United States Patent Application Publication US 2026/0285912 A1, published September 24, 2026 (application 19/474,285).

The application's sequence listing, which the Patent Office published only in electronic form, follows.

SEQUENCE LISTING (290 sequences)

SEQ ID NO: 1 - protein, 13 aa, synthetic construct
AHIVMVDAYKPTK

SEQ ID NO: 2 - protein, 14 aa, synthetic construct
VPTIVMVDAYKRYK

SEQ ID NO: 3 - protein, 16 aa, synthetic construct
RGVPHIVMVDAYKRYK

SEQ ID NO: 4 - protein, 16 aa, synthetic construct
TDKDMTITFTNKKDAE

SEQ ID NO: 5 - protein, 12 aa, synthetic construct
KLGDIEFIKVNK

SEQ ID NO: 6 - protein, 12 aa, synthetic construct
KLGSIEFIKVNK

SEQ ID NO: 7 - protein, 23 aa, synthetic construct
DIPATYEFTDGKHYITNEPIPPK

SEQ ID NO: 8 - protein, 6 aa, synthetic construct
GLSGSG

SEQ ID NO: 9 - protein, 8 aa, synthetic construct
GLSGLSGS

SEQ ID NO: 10 - protein, 10 aa, synthetic construct
GLSGLSGLSG

SEQ ID NO: 11 - protein, 10 aa, synthetic construct
GLSGGSGLSG

SEQ ID NO: 12 - protein, 6 aa, synthetic construct
GSGGSG

SEQ ID NO: 13 - protein, 596 aa, Hapavirus flanders
WTHDSGRSFVRQYHDPSWFDQTMVYPIECNSTWQEVNTLNLRCPKSLKIDPKNKLNFELGTVYHPLPSSRYVVNGYICHKQTWISKCEETWYFSTTETNKIENVPITPEDCREAVTIYEMGEYVNPFFPPFYCSWCSTQIDKKTFVIVEPHIVKEDIYNKTFIDPLFLNGYCDQLPCKTIHPDVLWVPQELQKRKDLCNKGTWETGKVFGVLEEKLYQNGYSKDNRFGIDEQWIRSSIYGLRSLVGSCYRGVCQQFGIRFKTGEWWGLEGKDVTVWIKRIIPKCQESQYVSFHHDNSDENIAEAQLVARELVCEEFLGRAKGGDLISPFDLNYLLPLNPGLGPSYRAFKRILKRDSHGGSSPQFRLEKRDCIYSIVHNVTEKVNITNNKLAIGQLFDGSYVYINESEFSRPDYLNNSDNASRDGWFLLSLNGMIKYGNSVYLPHGVSTGLSGIQDIVERGTLMLLDHPKSIAISNQMDLAKNIYTSYFQMNTTSIGSKIENMIIRAKNAVSSYFSQLTNIAWWIGTGILGLLGFIVIKRFHLIQLICGKKHRNGKIKKKNNKLNNGDQEAHVYDTISNTPKTPPHGKGTGVKYFDY

SEQ ID NO: 14 - protein, 509 aa, Vesiculovirus chandipura
SLSIAFPENTKLDWKPVTKNTRYCPMGGEWFLEPGLQEESFLSSTPIGATPSKSDGFLCHAAKWVTTCDFRWYGPKYITHSIHNIKPTRSDCDTALASYKSGTLVSPGFPPESCGYASVTDSEFLVIMITPHHVGVDDYRGHWVDPLFVGGECDQSYCDTIHNSSVWIPADQTKKNICGQSFTPLTVTVAYDKTKEIAAGAIVFKSKYHSHMEGARTCRLSYCGRNGIKFPNGEWVSLDVKTKIQEKPLLPLFKECPAGTEVRSTLQSDGAQVLTSEIQRILDYSLCQNTWDKVERKEPLSPLDLSYLASKSPGKGLAYTVINGTLSFAHTRYVRMWIDGPVLKEMKGKRESPSGISSDIWTQWFKYGDMEIGPNGLLKTAGGYKFPWHLIGMGIVDNELHELSEANPLDHPQLPHAQSIADDSEEIFFGDTGVSKNPVELVTGWFTSWKESLAAGVVLILVVVLIYGVLRCFPVLCTTCRKPKWKKGVERSDSFEMRIFKPNNMRARV

SEQ ID NO: 15 - protein, 505 aa, Vesiculovirus perinet
SFQIVFPEFNNAAWLPYLKTSRYCPQSAEMEFERRVSTTLLSADVPIGVTPTKSDGYLCHAAKWVTTCDFRWYGPKYVTHSIHDLTPAQVDCHEALARYKAGTLFNPGFPPASCGYATITDSEQKVVMITPHHVGIDDYRGKWIDPIFPGGECTTNYCETLHNSSVWLPADEKIVDICAQTFRKIKVTATYPSEGAVTKETISLHSAYHPHVPGTGICRMTYCSKEGLRLPNGEWLGIFYDNRIKTTDVRTVFPACPDGLEVKSTLNSDGANTIAWETQRMLDYALCQSTWDKVQNKEPLSAVDLSYLSARSPGKGLAYTVINGTLHFAHVRYVRTWIDGPVLKDLKGSRFDPTAAQKTLWDQWFPFGSNEIGPNGLLKTPKDFKFPLYIIGTGLVDEDLQELSEAGPIDHPQIPDASGILPNSEQVYYGDTGVSKNPIELIEGWFANWKETVMSIVGLVLLITIVFTVLKCIGTCRSLRRKRKIEKDIELQEIGPYQPTTYRPR

SEQ ID NO: 16 - protein, 511 aa, Vesiculovirus piry
KFQIVFPDQNELEWRPVVGDSRHCPQSSEMQFDGSRSQTILTGKAPVGITPSKSDGFICHAAKWVTTCDFRWYGPKYITHSIHHLRPTTSDCETALQRYKDGSLINLGFPPESCGYATVTDSEAMLVQVTPHHVGVDDYRGHWIDPLFPGGECSTNFCDTVHNSSVWIPKSQKTDICAQSFKNIKMTASYPSEGALVSDRFAFHSAYHPNMPGSTVCIMDFCEQKGLRFTNGEWMGLNVEQSIREKKISAIFPNCVAGTEIRATLESEGARTLTWETQRMLDYSLCQNTWDKVSRKEPLSPLDLSYLSPRAPGKGMAYTVINGTLHSAHAKYIRTWIDYGEMKEIKGGRGEYSKAPELLWSQWFDFGPFKIGPNGLLHTGKTFKFPLYLIGAGIIDEDLHELDEAAPIDHPQMPDAKSVLPEDEEIFFGDTGVSKNPIELIQGWFSNWRESVMAIVGIVLLIVVTFLAIKTVRVLNCLWRPRKKRIVRQEVDVESRLNHFEMRGFPEYVKR

SEQ ID NO: 17 - protein, 527 aa, Ledantevirus fukuoka
QQDYSYGGKTKDIIGLLPQDKKLHWKTTKLDSIKCPEMGLISNKEEHVVEKWLIERPRTTGKLRNKGKLCHLAKWITKCEYTWYFSKTVSRTIQNLEAHEDDCKQAIREYNQGKLIPGSFPPESCYWASTNEESVIAHIITPHEVTYDPYEDRYLDPLFVHGFCRTSFCETVYESTVWLTDSPGRQSSCKLEGDEPVEVLESYRHNKAGESKFGFWMRGSHIHHMPLSRLCKKEYCGKLGYVNQQGVWFHVTSVQWSYNESISFRHVVENCTESPDLVVLSEEFNDDDLAATLEEMMWDINCLNAVENIQKHKRASLHDLYQISQRHPGPGTAYRLKDGHLESAQANFVALYAPDEHEQNRECLGTVLDHTGDQCHAWDDWTHIANSTYHAVNGITEVDGKIVFPEYRVLKRRWDLEYSLKHDLRQINHPVISDFVGKVHENIVHKEIKSHSVNAGDLIGNWVTVAESKIGEFFKGFSHSFVTISVFLMVVLTIWIIIRCCQMCKREKPTKIISAKDDIPMVTSSFG

SEQ ID NO: 18 - protein, 641 aa, Hapavirus joinjakaka
ILWDFRINRLVRNKRKTQKTKLDQIGNGVVIQPIDPKEVHYNIVKPSIQIKNQSHPVIEIDDQKEPELKLEDFDWVSGNEFEGVVNMPVNCLTNWKVINPYAIRCPTFYEHDRYGGGRTVIGTAVHPEEIEHNIIPGFMCQKQTWVTECTEAWYWSTTVKNYVESSPVVEMECLMALAKEKVGTYVDPFFPPAECAWNANSRSSKEFVTLHPHDVRFDFYQYSKVDPLFVGGKCNEKSCPTIHQHVIWIGKNPVPLEGTCNLDRWRQSDIFALETHTSEKKVSDKVTIYLEFIESATYGMRSTKNACWTRFCDVPGIRFNDGEWWGIKSGHNVALDFLPECGKKSLITLHHAVNQDSEFKNRLSLKHYKCTEVLTKLISGSVITPMDISYLISDRPGLQSYYRFSAKQKGNGPVMGGGNNYMIEQKECMYQFVLLESDRFNITKQSDQINVGMTLQGDHIYINLTDFQHTKGNKSNDINRFTMTVNGYLKTGNVLVLPVDEITSESVDNTLYTPIGYHLIEEEEIGNYTTIGDAIEKILILDPRLNRTDIVEETVHFVNNIGKTVSSFFQGTSSLLWWGVTSVFFLVIVLLMRKCGVIDWLLKKKKPKSVERMNKYNSESNRMVDNKTSHGNVNGGFFGNV

SEQ ID NO: 19 - protein, 531 aa, Ghanaian bat henipavirus
DGTPAPVVKNETGDFLWGLGTELILPVEVISKWVEINPEDMRCPSDPVTDHVIGAIVGHTRFSRYSGFHKATQKGFLCHKMRWITACTTTWYFSHDVQRRVEAQEPGTQECLDQVKKRGEGTEEEGSYPPSQCAWNSVNEEAEVVIHLTVHEVRVDPYTMELLDPVFPSGRCNTTACDTVHQSVLWIEDPSKTRPSCGDRVVDEGNIIRSGWTDNVPGAYYLISQHLPPTKIDGACRLSFCGESGLLFENGIWTHDIKLETVVANQTFQNCQADRRAGAVGPTYEIDKLRFDWEAAKEKIKCLDMIEIISATGALSFRRLHHFNPRTPGIHPVYRIVNKTLQMAKAHYVVTNNPMSHKGTRDCLGTYMDHDTRKCVAWHHWVDVGNGTEQGPNGLLVTGDKVSYPHWFIREKTWDPALHIINYLQNADHPIVSHLGRYIDNASRDSLRKDRSENVGDAASAAVTKLAGSIGGVFKDVWHVITTCVTVGVIIIIILIFRRMIGVFWRGREKHPLPKTPNNIYQETHELKSFG

SEQ ID NO: 20 - protein, 554 aa, Ledantevirus keuraliba
YPIEDQMTIPLKPGIHRTLDGDLDYNDDEHYHSPPLVLPVPNNRSWKPVNLSTLKCPESSHLGPDTHRTLEKWLIFRPKSSILTKIEGVLCHKSRWLTRCQYTWYFSKTISRKIEPIPPTFQECQEAIKLKEEGILENLGFPPPNCYWARTNDEENILIEISEHPMTYDPYLDGVIDSILVGGKCSQKECETVHDSTIWIETQRDTRPSQCDMGTEEQLELVSGLKQIDGNKQKYQHSVFVVGTNYPFMDAKGACKLRFCGKSGMLLSNGLWFNIAHTILPKPEANSNFWSALPDCSSDKQVGVLGEEYEIEKLQATMEDIMWDLDCFRTVDSLAHHKKVSMLDLFRLAKLTPGPGPAYKLIEGTLMMKEVQYVKARRDTKEQANPLCAAYITESTSNQERCIDYSNYDQNGTYKGQVMNGILVTDGVLIFPHERFHLRQWDPEFIIKHDLQQVHHPVIGNFSKKLHDSIHNSLIKDHSANLGDVMGNWVKVAASKVSGFFKEIEKFLIGGLLLVVILLMVGLLCKCKCRRKPKAKNLKANSSGDEMSPNESIF

SEQ ID NO: 21 - protein, 495 aa, Vesiculovirus indiana
KFTIVFPHNQKGNWKNVPSNYHYCPSSSDLNWHNDLIGTAJQVKMPKSHKAIQADGWMCHASKWVTTCDFRWYGPKYITHSIRSFTPSVEQCKESIEQTKQGTWLNPGFPPQSCGYATVTDAEAVIVQVTPHHVLVDEYTGEWVDSQFINGKCSNYICPTVHNSTTWHSDYKVKGLCDSNLISMDITFFSEDGELSSLGKEGTGFRSNYFAYETGGKACKMQYCKHWGVRLPSGVWFEMADKDLFAAARFPECPEGSSISAPSQTSVDVSLIQDVERILDYSLCQETWSKIRAGLPISPVDLSYLAPKNPGTGPAFTIINGTLKYFETRYIRVDIAAPILSRMVGMISGTTTERELWDDWAPYEDVEIGPNGVLRTSSGYKFPLYMIGHGMLDSDLHLSSKAQVFEHPHIQDAASQLPDDESLFFGDTGLSKNPIELVEGWFSSWKSSIASFFFIIGLIIGLFLVLRVGIHLCIKLKHTKKRQIYTDIEMNRLGK

SEQ ID NO: 22 - protein, 501 aa, synthetic construct
KIEIVFPQHTTGDWKRVPHEYNYCPTSADKNSHGTQTGIPVELTMPKGLTTHQVDGFMCHSALWMTTCDFRWYGPKYITHSIHNEEPTDYQCLEAIKAYKDGVGFNPGFPPQSCGYGTVTDAEAHIITVTPHSVKVDEYTGEWIDPHFIGGRCKGKICETVHNSTKWFTSSDGESVCSQLFTLVGGTFFSDSEEITSMGLPETGIRSNYFPYISTEGICKMPFCRKPGYKLKNDLWFQITDPDLDKTVRDLPHIKDCDLSSSIITPGEHATDISLISDVERILDYALCQNTWGKIEAGEPITPVDLSYLGPKNPGVGPVFTIINSSLHYFTSKYLRVELESPVIPRMEGRVAGTRIVRQLWDQWFPFGEAEIGPNGVLKTKQGYKFPLHIIGTGEVDSDIKMERIVKHWEHPHIEAAQTYLKKDDTEEVIYYGDTGISKYPVELVEGWFSGWRSSIMGVVAVIIGFVILIFLIRLIGVLSSLFRPKRRPIYKSDVEMAHFR

SEQ ID NO: 23 - protein, 502 aa, Vesiculovirus carajas
KITISFPQSLKGDWRPVPKGYNYCPTSADKNLHGDLIDIGLRLRAPKSFKGISADGWMCHAARWITTCDFRWYGPKYITHSIHSFRPSNDQCKEAIRLTNEGNWINPGFPPQSCGYASVTDSESVVVTVTKHQVLVDEYSGSWIDSQFPGGSCTSPICDTVHNSTLWHADHTLDSICDQEFVAMDAVLFTESGKFEEFGKPNSGIRSNYFPYESLKDVCQMDFCKRKGFKLPSGVWFEIEDAEKSHKAQVELKIKRCPHGAVISAPNQNAADINLIMDVERILDYSLCQATWSKIQNKEALTPIDISYLGPKNPGPGPAFTIINGTLHYFNTRYIRVDIAGPVTKEITGFVSGTSTSRVLWDQWFPYGENSIGPNGLLKTASGYKYPLFMVGTGVLDADIHKLGEATVIEHPHAKEAQKVVDDSEVIFFGDTGVSKNPVEVVEGWFSGWRSSLMSIFGIILLIVCLVLIVRILIALKYCCVRHKKRTIYKEDLEMGRIPRRA

SEQ ID NO: 24 - protein, 494 aa, Vesiculovirus alagoas
KFTIVFPQSQKGDWKDVPPNYRYCPSSADQNWHGDLLGVNIRAKMPKVHKAIKADGWMCHAAKWVTTCDYRWYGPQYITHSIHSFIPTKAQCEESIKQTKEGVWINPGFPPKNCGYASVSDAESIIVQATAHSVMIDEYSGDWLDSQFPTGRCTGSTCETIHNSTLWYADYQVTGLCDSALVSTEVTFYSEDGLMTSIGRQNTGYRSNYFPYEKGAAACRMKYCTHEGIRLPSGVWFEMVDKELLESVQMPECPAGLTISAPTQTSVDVSLILDVERMLDYSLCQETWSKVHSGLPISPVDLGYIAPKNPGAGPAFTIVNGTLKYFDTRYLRIDIEGPVLKKMTGKVSGTPTKRELWTEWFPYDDVEIGPNGVLKTPEGYKFPLYMIGHGLLDSDLQKTSQAEVFHHPQIAEAVQKLPDDETLFFGDTGISKNPVEVIEGWFSNWRSSVMAIVFAILLLVITVLMVRLCVAFRHFCCQKRHKIYNDLEMNQLRR

SEQ ID NO: 25 - protein, 495 aa, synthetic construct
KFTIVFPHNQKGNWKNVPSNYHYCPSSSDLNWHNDLIGTAJQVKMPQSHKAIQADGWMCHASKWVTTCDFRWYGPKYITHSIRSFTPSVEQCKESIEQTKQGTWLNPGFPPQSCGYATVTDAEAVIVQVTPHHVLVDEYTGEWVDSQFINGKCSNYICPTVHNSTTWHSDYKVKGLCDSNLISMDITFFSEDGELSSLGKEGTGFRSNYFAYETGGKACKMQYCKHWGVRLPSGVWFEMADKDLFAAARFPECPEGSSISAPSQTSVDVSLIQDVERILDYSLCQETWSKIRAGLPISPVDLSYLAPKNPGTGPAFTIINGTLKYFETRYIRVDIAAPILSRMVGMISGTTTEQELWDDWAPYEDVEIGPNGVLRTSSGYKFPLYMIGHGMLDSDLHLSSKAQVFEHPHIQDAASQLPDDESLFFGDTGLSKNPIELVEGWFSSWKSSIASFFFIIGLIIGLFLVLRVGIHLCIKLKHTKKRQIYTDIEMNRLGK

SEQ ID NO: 26 - protein, 495 aa, synthetic construct
KFTIVFPHNQKGNWKNVPSNYHYCPSSSDLNWHNDLIGTAJQVKMPQSHKAIQADGWMCHASKWVTTCDFRWYGPKYITHSIRSFTPSVEQCKESIEQTKQGTWLNPGFPPQSCGYATVTDAEAVIVQVTPHHVLVDEYTGEWVDSQFINGKCSNYICPTVHNSTTWHSDYKVKGLCDSNLISMDITFFSEDGELSSLGKEGTGFRSNQFAYETGGKACKMQYCKHWGVRLPSGVWFEMADKDLFAAARFPECPEGSSISAPSQTSVDVSLIQDVERILDYSLCQETWSKIRAGLPISPVDLSYLAPKNPGTGPAFTIINGTLKYFETRYIRVDIAAPILSRMVGMISGTTTEQELWDDWAPYEDVEIGPNGVLRTSSGYKFPLYMIGHGMLDSDLHLSSKAQVFEHPHIQDAASQLPDDESLFFGDTGLSKNPIELVEGWFSSWKSSIASFFFIIGLIIGLFLVLRVGIHLCIKLKHTKKRQIYTDIEMNRLGK

SEQ ID NO: 27 - protein, 494 aa, synthetic construct
KFTIVFPHNQKGNWKNVPSNYHYCPSSSDLNWHNDLIGTAJQVKMPSHKAIQADGWMCHASKWVTTCDFRWYGPKYITHSIRSFTPSVEQCKESIEQTKQGTWLNPGFPPQSCGYATVTDAEAVIVQVTPHHVLVDEYTGEWVDSQFINGKCSNYICPTVHNSTTWHSDYKVKGLCDSNLISMDITFFSEDGELSSLGKEGTGFRSNYFAYETGGKACKMQYCKHWGVRLPSGVWFEMADKDLFAAARFPECPEGSSISAPSQTSVDVSLIQDVERILDYSLCQETWSKIRAGLPISPVDLSYLAPKNPGTGPAFTIINGTLKYFETRYIRVDIAAPILSRMVGMISGTTTERELWDDWAPYEDVEIGPNGVLRTSSGYKFPLYMIGHGMLDSDLHLSSKAQVFEHPHIQDAASQLPDDESLFFGDTGLSKNPIELVEGWFSSWKSSIASFFFIIGLIIGLFLVLRVGIHLCIKLKHTKKRQIYTDIEMNRLGK

SEQ ID NO: 28 - protein, 492 aa, synthetic construct
KFTIVFPHNQKGNWKNVPSNYHYCPSSSDLNWHNDLIGTAJQVKMPSHKAIQADGWMCHASKWVTTCDFRWYGPKYITHSIRSFTPSVEQCKESIEQTKQGTWLNPGFPPQSCGYATVTDAEAVIVQVTPHHVLVDEYTGEWVDSQFINGKCSNYICPTVHNSTTWHSDYKVKGLCDSNLISMDITFFSEDGELSSLGKEGTGFRSNYFAETGGKACKMQYCKHWGVRLPSGVWFEMADKDLFAAARFPECPEGSSISAPSQTSVDVSLIQDVERILDYSLCQETWSKIRAGLPISPVDLSYLAPKNPGTGPAFTIINGTLKYFETRYIRVDIAAPILSRMVGMISGTTTEELWDDWAPYEDVEIGPNGVLRTSSGYKFPLYMIGHGMLDSDLHLSSKAQVFEHPHIQDAASQLPDDESLFFGDTGLSKNPIELVEGWFSSWKSSIASFFFIIGLIIGLFLVLRVGIHLCIKLKHTKKRQIYTDIEMNRLGK

SEQ ID NO: 29 - protein, 500 aa, synthetic construct
KIEIVFPQHTTGDWKRVPHEYNYCPTSADKNSHGTQTGIPVELTMPGLTTHQVDGFMCHSALWMTTCDFRWYGPKYITHSIHNEEPTDYQCLEAIKAYKDGVGFNPGFPPQSCGYGTVTDAEAHIITVTPHSVKVDEYTGEWIDPHFIGGRCKGKICETVHNSTKWFTSSDGESVCSQLFTLVGGTFFSDSEEITSMGLPETGIRSNYFPYISTEGICKMPFCRKPGYKLKNDLWFQITDPDLDKTVRDLPHIKDCDLSSSIITPGEHATDISLISDVERILDYALCQNTWGKIEAGEPITPVDLSYLGPKNPGVGPVFTIINSSLHYFTSKYLRVELESPVIPRMEGRVAGTRIVRQLWDQWFPFGEAEIGPNGVLKTKQGYKFPLHIIGTGEVDSDIKMERIVKHWEHPHIEAAQTYLKKDDTEEVIYYGDTGISKYPVELVEGWFSGWRSSIMGVVAVIIGFVILIFLIRLIGVLSSLFRPKRRPIYKSDVEMAHFR

SEQ ID NO: 30 - protein, 116 aa, synthetic construct
GAMVDTLSGLSSEQGQSGDMTIEEDSATHIKFSKRDEDGKELAGATMELRDSSGKTISTWISDGQVKDFYLYPGKYTFVETAAPDGYEVATAITFTVNEQGQVTVNGKATKGDAHI

SEQ ID NO: 31 - protein, 115 aa, synthetic construct
AMVTTLSGLSGEQGPSGDMTTEEDSATHIKFSKRDEDGRELAGATMELRDSSGKTISTWISDGHVKDFYLYPGKYTFVETAAPDGYEVATAITFTVNEQGQVTVNGEATKGDAHT

SEQ ID NO: 32 - protein, 113 aa, synthetic construct
VTTLSGLSGEQGPSGDMTTEEDSATHIKFSKRDEDGRELAGATMELRDSSGKTISTWISDGHVKDFYLYPGKYTFVETAAPDGYEVATPIEFTVNEDGQVTVDGEATEGDAHT

SEQ ID NO: 33 - protein, 10 aa, synthetic construct
ATHIKFSKRD

SEQ ID NO: 34 - protein, 281 aa, synthetic construct
ATTVHGETVVNGAKLTVTKNLDLVNSNALIPNTDFTFKIEPDTTVNEDGNKFKGVALNTPMTKVTYTNSDKGGSNTKTAEFDFSEVTFEKPGVYYYKVTEEKIDKVPGVSYDTTSYTVQVHVLWNEEQQKPVATYIVGYKEGSKVIQFKNSLDSTTLTVKKKVSGTGGDRSKDFNFGLTLKANQYYKASEKVMIEKTTKGGQAPVQTEASIDQLYHFTLKDGESIKVTNLPVGVDYVVTEDDYKSEKYTTNVEVSPQDGAVKNIAGNSTEQETSTDKDMTI

SEQ ID NO: 35 - protein, 112 aa, synthetic construct
KPLRGAVFSLQKQHPDYPDIYGAIDQNGTYQNVRTGEDGKLTFKNLSDGKYRLFENSEPAGYKPVQNKPIVAFQIVNGEVRDVTSIVPQDIPATYEFTNGKHYITNEPIPPK

SEQ ID NO: 36 - protein, 15 aa, synthetic construct
GGGGSGGGGSGGGGS

SEQ ID NO: 37 - protein, 106 aa, synthetic construct [sequence omitted]

SEQ ID NO: 38 - protein, 120 aa, synthetic construct [sequence omitted]

SEQ ID NO: 39 - protein, 107 aa, synthetic construct
QIVLTQSPAIMSASPGEKVTMTCSASSSVSYMNWYQQKSGTSPKRWIYDTSKLASGVPAHFRGSGSGTSYSLTISGMEAEDAATYYCQQWSSNPFTFGSGTKLEINR

SEQ ID NO: 40 - protein, 119 aa, synthetic construct [sequence omitted]

SEQ ID NO: 41 - protein, 106 aa, synthetic construct
QIVLTQSPAIMSASPGEKVTMTCRASSSVSYMNWYQQKSGTSPKRWIYDTSKVASGVPYRFSGSGSGTSYSLTISSMEAEDAATYYCQQWSSNPLTFGAGTKLELK

SEQ ID NO: 42 - protein, 119 aa, synthetic construct
QVQLQQSGAELARPGASVKMSCKTSGYTFTRYTMHWVKQRPGQGLEWIGYINPSRGYTNYNQKFKDKATLTTDKSSSTAYMQLSSLTSEDSAVYYCARYYDDHYSLDYWGQGTTLTVSS

SEQ ID NO: 43 - protein, 106 aa, synthetic construct
QIVLTQSPSSLSASLGEKVTMTCRASSSVSYMNWYQQKPGTSPKRWIYDTSKVASGVPDRFSGSGSGTSYSLTISSMEAEDAATYYCQQWSSNPLTFGAGTKLELK

SEQ ID NO: 44 - protein, 119 aa, synthetic construct; identical to SEQ ID NO: 42

SEQ ID NO: 45 - protein, 122 aa, synthetic construct [sequence omitted]

SEQ ID NO: 46 - protein, 107 aa, synthetic construct [sequence omitted]

SEQ ID NO: 47 - protein, 127 aa, synthetic construct
QVKLEESGGGSVQTGGSLRLTCAASGRTSRSYGMGWFRQAPGKEREFVSGISWRGDSTGYADSVKGRFTISRDNAKNTVDLQMNSLKPEDTAIYYCAAAAGSAWYGTLYEYDYWGQGTQVTVSSALE

SEQ ID NO: 48 - protein, 130 aa, synthetic construct
EVQLVESGGGLVQAGGSLRLSCAASGRTFSSYAMGWFRQAPGKEREFVVAINWSSGSTYYADSVKGRFTISRDNAKNTMYLQMNSLKPEDTAVYYCAAGYQINSGNYNFKDYEYDYWGQGTQVTVSSALE

SEQ ID NO: 49 - protein, 244 aa, synthetic construct
MAEVQLQQSGAELVKPGASVKLSCKASGYTFTSHWMHWVKQRAGQGLEWIGEFNPSNGRTNYNEKFKSKATLTVDKSSSTAYMQLSSLTSEDSAVYYCASRDYDYDGRYFDYWGQGTTVTVSSGGGGSGGGGSGGGGSDIELTQSPAIMSASPGEKVTMTCSASSSVTYMYWYQQKPGSSPRLLIYDTSNLASGVPVRFSGSGSGTSYSLTISRMEAEDAATYYCQQWSSHIFTFGSGTELEIK

SEQ ID NO: 50 - protein, 27 aa, synthetic construct
NKFNKGMRGYWGALGGGNGKRGIMGYD

SEQ ID NO: 51 - protein, 255 aa, synthetic construct
QVQLVQSGAEVKKPGESLKISCKGSGYSFTSYWIAWVRQMPGKGLEYMGLIYPGDSDTKYSPSFQGQVTISVDKSVSTAYLQWSSLKPSDSAVYFCARHDVGYCTDRTCAKWPEWLGVWGQGTLVTVSSGGGGSGGGGSGGGGSQSVLTQPPSVSAAPGQKVTISCSGSSSNIGNNYVSWYQQLPGTAPKLLIYDHTNRPAGVPDRFSGSKSGTSASLAISGFRSEDEADYYCASWDYTLSGWVFGGGTKVTVLG

SEQ ID NO: 52 - protein, 165 aa, Homo sapiens
EGICRNRVTNNVKDVTKLVANLPKDYMITLKYVPGMDVLPSHCWISEMVVQLSDSLTDLLDKFSNISEGLSNYSIIDKLVNIVDDLVECVKENSSKDLKKSFKSPEPRLFTPEEFFRIFNRSIDAFKDFVVASETSDCVVSSTLSPEKDSRVSVTKPFMLPPVAA

SEQ ID NO: 53 - protein, 248 aa, Mus musculus
KEICGNPVTDNVKDITKLVANLPNDYMITLNYVAGMDVLPSHCWLRDMVIQLSLSLTTLLDKFSNISEGLSNYSIIDKLGKIVDDLVLCMEENAPKNIKESPKRPETRSFTPEEFFSIFNRSIDAFKDFMVASDTSDCVLSSTLGPEKDSRVSVTKPFMLPPVAASSLRNDSSSSNRKAAKAPEDSGLQWTAMALPALISLVIGFAFGALYWKKKQSSLTRAVENIQINEEDNEISMLQQKEREFQEV

SEQ ID NO: 54 - protein, 141 aa, Mus musculus
KEICGNPVTDNVKDITKLVANLPNDYMITLNYVAGMDVLPSHCWLRDMVIQLSLSLTTLLDKFSNISEGLSNYSIIDKLGKIVDDLVLCMEENAPKNIKESPKRPETRSFTPEEFFSIFNRSIDAFKDFMVASDTSDCVLS

SEQ ID NO: 55 - protein, 335 aa, Mus musculus
SPVAPACDPRLLNKLLRDSHLLHSRLSQCPDVDPLSIPVLLPAVDFSLGEWKTQTEQSKAQDILGAVSLLLEGVMAARGQLEPSCLSSLLGQLSGQVRLLLGALQGLLGTQLPLQGRTTAHKDPNALFLSLQQLLRGKVRFLLLVEGPTLCVRRTLPTTAVPSSTSQLLTLNKFPNRTSGLLETNFSVTARTAGPGLLSRLQGFRVKITPGQLNQTSRSPVQISGYLNRTHGPVNGTHGLFAGTSLQTLEASDISPGAFNKGSLAFNLQGGLPPSPSLAPDGHTPFPPSPALPTTHGSPPQLHPLFPDPSTTMPNSTAPHPVTMYPHPRNLSQET

SEQ ID NO: 56 - protein, 161 aa, synthetic construct
CIIGKGRSYKGTVSITKSGIKCQPWSSMIPHEHSFLPSSYRGKDLQENYCRNPRGEEGGPWCFTSNPEVRYEVCDIPQCSEVECMTCNGESYRGLMDHTESGKICQRWDHQTPHRHKFLPERYPDKGFDDNYCRNPDGQPRPWCYTLDPHTRWEYCAIKTC

SEQ ID NO: 57 - protein, 699 aa, Homo sapiens
NSQRKRRNTIHEFKKSAKTTLIKIDPALKIKTKKVNTADQCANRCTRNKGLPFTCKAFVFDKARKQCLWFPFNSMSSGVKKEFGHEFDLYENKDYIRNCIIGKGRSYKGTVSITKSGIKCQPWSSMIPHEHSFLPSSYRGKDLQENYCRNPRGEEGGPWCFTSNPEVRYEVCDIPQCSEVECMTCNGESYRGLMDHTESGKICQRWDHQTPHRHKFLPERYPDKGFDDNYCRNPDGQPRPWCYTLDPHTRWEYCAIKTCADNTMNDTDVPLETTECIQGQGEGYRGTVNTIWNGIPCQRWDSQYPHEHDMTPENFKCKDLRENYCRNPDGSESPWCFTTDPNIRVGYCSQIPNCDMSHGQDCYRGNGKNYMGNLSQTRSGLTCSMWDKNMEDLHRHIFWEPDASKLNENYCRNPDDDAHGPWCYTGNPLIPWDYCPISRCEGDTTPTIVNLDHPVISCAKTKQLRVVNGIPTRTNIGWMVSLRYRNKHICGGSLIKESWVLTARQCFPSRDLKDYEAWLGIHDVHGRGDEKCKQVLNVSQLVYGPEGSDLVLMKLARPAVLDDFVSTIDLPNYGCTIPEKTSCSVYGWGYTGLINYDGLLRVAHLYIMGNEKCSQHHRGKVTLNESEICAGAEKIGSGPCEGDYGGPLVCEQHKMRMVLGVIVPGRGCAIPNRPGIFVRVAYYAKWIHKIILTYKVPQS

SEQ ID NO: 58 - protein, 195 aa, Homo sapiens
MGKISSLPTQLFKCCFCDFLKVKMHTMSSSHLFYLALCLLTFTSSATAGPETLCGAELVDALQFVCGDRGFYFNKPTGYGSSSRRAPQTGIVDECCFRSCDLRRLEMYCAPLKPAKSARSVRAQRHTDMPKTQKYQPPSTNKNTKSQRRKGWPKTHPGGEQKEGTEASLQIRGKKKEQRREIGSRNAECRGKKGK

SEQ ID NO: 59 - protein, 53 aa, synthetic construct
NSYSECPPSYDGYCLHDGVCRYIEALDSYACNCVVGYAGERCQYRDLRWWGRR

SEQ ID NO: 60 - protein, 16 aa, synthetic construct
MKCLLYLAFLFIGVNC

SEQ ID NO: 61 - protein, 20 aa, synthetic construct
METDTLLLWVLLLWVPGSTG

SEQ ID NO: 62 - protein, 8 aa, synthetic construct
DYKDDDDK

SEQ ID NO: 63 - protein, 189 aa, synthetic construct
GAMVDTLSGLSSEQGQSGDMTIEEDSATHIKFSKRDEDGKELAGATMELRDSSGKTISTWISDGQVKDFYLYPGKYTFVETAAPDGYEVATAITFTVNEQGQVTVNGKATKGDAHIGSGGSGNSYSECPPSYDGYCLHDGVCRYIEALDSYACNCVVGYAGERCQYRDLRWWGRRGSGGSGDYKDDDDK

SEQ ID NO: 64 - protein, 508 aa, synthetic construct
AHIVMVDAYKPTKKFTIVFPHNQKGNWKNVPSNYHYCPSSSDLNWHNDLIGTALQVKMPKSHKAIQADGWMCHASKWVTTCDFRWYGPKYITHSIRSFTPSVEQCKESIEQTKQGTWLNPGFPPQSCGYATVTDAEAVIVQVTPHHVLVDEYTGEWVDSQFINGKCSNYICPTVHNSTTWHSDYKVKGLCDSNLISMDITFFSEDGELSSLGKEGTGFRSNYFAYETGGKACKMQYCKHWGVRLPSGVWFEMADKDLFAAARFPECPEGSSISAPSQTSVDVSLIQDVERILDYSLCQETWSKIRAGLPISPVDLSYLAPKNPGTGPAFTIINGTLKYFETRYIRVDIAAPILSRMVGMISGTTTERELWDDWAPYEDVEIGPNGVLRTSSGYKFPLYMIGHGMLDSDLHLSSKAQVFEHPHIQDAASQLPDDESLFFGDTGLSKNPIELVEGWFSSWKSSIASFFFIIGLIIGLFLVLRVGIHLCIKLKHTKKRQIYTDIEMNRLGK

SEQ ID NO: 65 - protein, 514 aa, synthetic construct
AHIVMVDAYKPTKGSGGSGKFTIVFPHNQKGNWKNVPSNYHYCPSSSDLNWHNDLIGTALQVKMPKSHKAIQADGWMCHASKWVTTCDFRWYGPKYITHSIRSFTPSVEQCKESIEQTKQGTWLNPGFPPQSCGYATVTDAEAVIVQVTPHHVLVDEYTGEWVDSQFINGKCSNYICPTVHNSTTWHSDYKVKGLCDSNLISMDITFFSEDGELSSLGKEGTGFRSNYFAYETGGKACKMQYCKHWGVRLPSGVWFEMADKDLFAAARFPECPEGSSISAPSQTSVDVSLIQDVERILDYSLCQETWSKIRAGLPISPVDLSYLAPKNPGTGPAFTIINGTLKYFETRYIRVDIAAPILSRMVGMISGTTTERELWDDWAPYEDVEIGPNGVLRTSSGYKFPLYMIGHGMLDSDLHLSSKAQVFEHPHIQDAASQLPDDESLFFGDTGLSKNPIELVEGWFSSWKSSIASFFFIIGLIIGLFLVLRVGIHLCIKLKHTKKRQIYTDIEMNRLGK

SEQ ID NO: 66 - protein, 514 aa, synthetic construct
AHIVMVDAYKPTKGSGGSGKFTIVFPHNQKGNWKNVPSNYHYCPSSSDLNWHNDLIGTAJQVKMPQSHKAIQADGWMCHASKWVTTCDFRWYGPKYITHSIRSFTPSVEQCKESIEQTKQGTWLNPGFPPQSCGYATVTDAEAVIVQVTPHHVLVDEYTGEWVDSQFINGKCSNYICPTVHNSTTWHSDYKVKGLCDSNLISMDITFFSEDGELSSLGKEGTGFRSNQFAYETGGKACKMQYCKHWGVRLPSGVWFEMADKDLFAAARFPECPEGSSISAPSQTSVDVSLIQDVERILDYSLCQETWSKIRAGLPISPVDLSYLAPKNPGTGPAFTIINGTLKYFETRYIRVDIAAPILSRMVGMISGTTTEQELWDDWAPYEDVEIGPNGVLRTSSGYKFPLYMIGHGMLDSDLHLSSKAQVFEHPHIQDAASQLPDDESLFFGDTGLSKNPIELVEGWFSSWKSSIASFFFIIGLIIGLFLVLRVGIHLCIKLKHTKKRQIYTDIEMNRLGK

SEQ ID NO: 67 - protein, 380 aa, synthetic construct
GAMVDTLSGLSSEQGQSGDMTIEEDSATHIKFSKRDEDGKELAGATMELRDSSGKTISTWISDGQVKDFYLYPGKYTFVETAAPDGYEVATAITFTVNEQGQVTVNGKATKGDAHIGSGGSGEVQLVESGGGLVQPGGSLRLSCAASGYSFTGYTMNWVRQAPGKGLEWVALINPYKGVSTYNQKFKDRFTISVDKSKNTAYLQMNSLRAEDTAVYYCARSGYYGDSDWYFDVWGQGTLVTVSSGGGGSGGGGSGGGGSDIQMTQSPSSLSASVGDRVTITCRASQDIRNYLNWYQQKPGKAPKLLIYYTSRLESGVPSRFSGSGSGTDYTLTISSLQPEDFATYYCQQGNTLPWTFGQGTKVEIKGSGGSGDYKDDDDK

SEQ ID NO: 68 - protein, 517 aa, synthetic construct
RGVPHIVMVDAYKRYKGSGGSGKFTIVFPHNQKGNWKNVPSNYHYCPSSSDLNWHNDLIGTAJQVKMPQSHKAIQADGWMCHASKWVTTCDFRWYGPKYITHSIRSFTPSVEQCKESIEQTKQGTWLNPGFPPQSCGYATVTDAEAVIVQVTPHHVLVDEYTGEWVDSQFINGKCSNYICPTVHNSTTWHSDYKVKGLCDSNLISMDITFFSEDGELSSLGKEGTGFRSNQFAYETGGKACKMQYCKHWGVRLPSGVWFEMADKDLFAAARFPECPEGSSISAPSQTSVDVSLIQDVERILDYSLCQETWSKIRAGLPISPVDLSYLAPKNPGTGPAFTIINGTLKYFETRYIRVDIAAPILSRMVGMISGTTTEQELWDDWAPYEDVEIGPNGVLRTSSGYKFPLYMIGHGMLDSDLHLSSKAQVFEHPHIQDAASQLPDDESLFFGDTGLSKNPIELVEGWFSSWKSSIASFFFIIGLIIGLFLVLRVGIHLCIKLKHTKKRQIYTDIEMNRLGK

SEQ ID NO: 69 - protein, 377 aa, synthetic construct
VTTLSGLSGEQGPSGDMTTEEDSATHIKFSKRDEDGRELAGATMELRDSSGKTISTWISDGHVKDFYLYPGKYTFVETAAPDGYEVATPIEFTVNEDGQVTVDGEATEGDAHTGSGGSGEVQLVESGGGLVQPGGSLRLSCAASGYSFTGYTMNWVRQAPGKGLEWVALINPYKGVSTYNQKFKDRFTISVDKSKNTAYLQMNSLRAEDTAVYYCARSGYYGDSDWYFDVWGQGTLVTVSSGGGGSGGGGSGGGGSDIQMTQSPSSLSASVGDRVTITCRASQDIRNYLNWYQQKPGKAPKLLIYYTSRLESGVPSRFSGSGSGTDYTLTISSLQPEDFATYYCQQGNTLPWTFGQGTKVEIKGSGGSGDYKDDDDK

SEQ ID NO: 70 - protein, 516 aa, synthetic construct
RGVPHIVMVDAYKRYKGSGGSGKFTIVFPHNQKGNWKNVPSNYHYCPSSSDLNWHNDLIGTALQVKMPSHKAIQADGWMCHASKWVTTCDFRWYGPKYITHSIRSFTPSVEQCKESIEQTKQGTWLNPGFPPQSCGYATVTDAEAVIVQVTPHHVLVDEYTGEWVDSQFINGKCSNYICPTVHNSTTWHSDYKVKGLCDSNLISMDITFFSEDGELSSLGKEGTGFRSNYFAYETGGKACKMQYCKHWGVRLPSGVWFEMADKDLFAAARFPECPEGSSISAPSQTSVDVSLIQDVERILDYSLCQETWSKIRAGLPISPVDLSYLAPKNPGTGPAFTIINGTLKYFETRYIRVDIAAPILSRMVGMISGTTTERELWDDWAPYEDVEIGPNGVLRTSSGYKFPLYMIGHGMLDSDLHLSSKAQVFEHPHIQDAASQLPDDESLFFGDTGLSKNPIELVEGWFSSWKSSIASFFFIIGLIIGLFLVLRVGIHLCIKLKHTKKRQIYTDIEMNRLGK

SEQ ID NO: 71 - protein, 502 aa, synthetic construct
RITISFPQSLKGDWRPVPKGYNYCPTSADKNLHGDLIDIGLRLRAPQSFKGISADGWMCHAARWITTCDFRWYGPKYITHSIHSFRPSNDQCKEAIRLTNEGNWINPGFPPQSCGYASVTDSESVVVTVTKHQVLVDEYSGSWIDSQFPGGSCTSPICDTVHNSTLWHADHTLDSICDQEFVAMDAVLFTESGKFEEFGKPNSGIRSNQFPYESLKDVCQMDFCKRKGFKLPSGVWFEIEDAEKSHKAQVELKIKRCPHGAVISAPNQNAADINLIMDVERILDYSLCQATWSKIQNKEALTPIDISYLGPKNPGPGPAFTIINGTLHYFNTRYIRVDIAGPVTKEITGFVSGTSTSQVLWDQWFPYGENSIGPNGLLKTASGYKYPLFMVGTGVLDADIHKLGEATVIEHPHAKEAQKVVDDSEVIFFGDTGVSKNPVEVVEGWFSGWRSSLMSIFGIILLIVCLVLIVRILIALKYCCVRHKKRTIYKEDLEMGRIPRRA

SEQ ID NO: 72 - protein, 494 aa, synthetic construct
RFTIVFPQSQKGDWKDVPPNYRYCPSSADQNWHGDLLGVNIRAKMPQVHKAIKADGWMCHAAKWVTTCDYRWYGPQYITHSIHSFIPTKAQCEESIKQTKEGVWINPGFPPKNCGYASVSDAESIIVQATAHSVMIDEYSGDWLDSQFPTGRCTGSTCETIHNSTLWYADYQVTGLCDSALVSTEVTFYSEDGLMTSIGRQNTGYRSNQFPYEKGAAACRMKYCTHEGIRLPSGVWFEMVDKELLESVQMPECPAGLTISAPTQTSVDVSLILDVERMLDYSLCQETWSKVHSGLPISPVDLGYIAPKNPGAGPAFTIVNGTLKYFDTRYLRIDIEGPVLKKMTGKVSGTPTKQELWTEWFPYDDVEIGPNGVLKTPEGYKFPLYMIGHGLLDSDLQKTSQAEVFHHPQIAEAVQKLPDDETLFFGDTGISKNPVEVIEGWFSNWRSSVMAIVFAILLLVITVLMVRLCVAFRHFCCQKRHKIYNDLEMNQLRR

SEQ ID NO: 73 - protein, 501 aa, synthetic construct
KIEIVFPQHTTGDWKRVPHEYNYCPTSADKNSHGTQTGIPVELTMPQGLTTHQVDGFMCHSALWMTTCDFRWYGPKYITHSIHNEEPTDYQCLEAIKAYKDGVGFNPGFPPQSCGYGTVTDAEAHIITVTPHSVKVDEYTGEWIDPHFIGGRCKGKICETVHNSTKWFTSSDGESVCSQLFTLVGGTFFSDSEEITSMGLPETGIRSNQFPYISTEGICKMPFCRKPGYKLKNDLWFQITDPDLDKTVRDLPHIKDCDLSSSIITPGEHATDISLISDVERILDYALCQNTWGKIEAGEPITPVDLSYLGPKNPGVGPVFTIINSSLHYFTSKYLRVELESPVIPRMEGRVAGTRIVQQLWDQWFPFGEAEIGPNGVLKTKQGYKFPLHIIGTGEVDSDIKMERIVKHWEHPHIEAAQTYLKKDDTEEVIYYGDTGISKYPVELVEGWFSGWRSSIMGVVAVIIGFVILIFLIRLIGVLSSLFRPKRRPIYKSDVEMAHFR

SEQ ID NO: 74 - protein, 521 aa, synthetic construct
AHIVMVDAYKPTKGSGGSGRITISFPQSLKGDWRPVPKGYNYCPTSADKNLHGDLIDIGLRLRAPQSFKGISADGWMCHAARWITTCDFRWYGPKYITHSIHSFRPSNDQCKEAIRLTNEGNWINPGFPPQSCGYASVTDSESVVVTVTKHQVLVDEYSGSWIDSQFPGGSCTSPICDTVHNSTLWHADHTLDSICDQEFVAMDAVLFTESGKFEEFGKPNSGIRSNQFPYESLKDVCQMDFCKRKGFKLPSGVWFEIEDAEKSHKAQVELKIKRCPHGAVISAPNQNAADINLIMDVERILDYSLCQATWSKIQNKEALTPIDISYLGPKNPGPGPAFTIINGTLHYFNTRYIRVDIAGPVTKEITGFVSGTSTSQVLWDQWFPYGENSIGPNGLLKTASGYKYPLFMVGTGVLDADIHKLGEATVIEHPHAKEAQKVVDDSEVIFFGDTGVSKNPVEVVEGWFSGWRSSLMSIFGIILLIVCLVLIVRILIALKYCCVRHKKRTIYKEDLEMGRIPRRA

SEQ ID NO: 75 - protein, 513 aa, synthetic construct
AHIVMVDAYKPTKGSGGSGRFTIVFPQSQKGDWKDVPPNYRYCPSSADQNWHGDLLGVNIRAKMPQVHKAIKADGWMCHAAKWVTTCDYRWYGPQYITHSIHSFIPTKAQCEESIKQTKEGVWINPGFPPKNCGYASVSDAESIIVQATAHSVMIDEYSGDWLDSQFPTGRCTGSTCETIHNSTLWYADYQVTGLCDSALVSTEVTFYSEDGLMTSIGRQNTGYRSNQFPYEKGAAACRMKYCTHEGIRLPSGVWFEMVDKELLESVQMPECPAGLTISAPTQTSVDVSLILDVERMLDYSLCQETWSKVHSGLPISPVDLGYIAPKNPGAGPAFTIVNGTLKYFDTRYLRIDIEGPVLKKMTGKVSGTPTKQELWTEWFPYDDVEIGPNGVLKTPEGYKFPLYMIGHGLLDSDLQKTSQAEVFHHPQIAEAVQKLPDDETLFFGDTGISKNPVEVIEGWFSNWRSSVMAIVFAILLLVITVLMVRLCVAFRHFCCQKRHKIYNDLEMNQLRR

SEQ ID NO: 76 - protein, 520 aa, synthetic construct
AHIVMVDAYKPTKGSGGSGKIEIVFPQHTTGDWKRVPHEYNYCPTSADKNSHGTQTGIPVELTMPQGLTTHQVDGFMCHSALWMTTCDFRWYGPKYITHSIHNEEPTDYQCLEAIKAYKDGVGFNPGFPPQSCGYGTVTDAEAHIITVTPHSVKVDEYTGEWIDPHFIGGRCKGKICETVHNSTKWFTSSDGESVCSQLFTLVGGTFFSDSEEITSMGLPETGIRSNQFPYISTEGICKMPFCRKPGYKLKNDLWFQITDPDLDKTVRDLPHIKDCDLSSSIITPGEHATDISLISDVERILDYALCQNTWGKIEAGEPITPVDLSYLGPKNPGVGPVFTIINSSLHYFTSKYLRVELESPVIPRMEGRVAGTRIVQQLWDQWFPFGEAEIGPNGVLKTKQGYKFPLHIIGTGEVDSDIKMERIVKHWEHPHIEAAQTYLKKDDTEEVIYYGDTGISKYPVELVEGWFSGWRSSIMGVVAVIIGFVILIFLIRLIGVLSSLFRPKRRPIYKSDVEMAHFR

SEQ ID NO: 77 - protein, 422 aa, synthetic construct
KFTIVFPHNQKGNWKNVPSNYHYCPSSSDLNWHNDLIGTAIQVKMPKSHKAIQADGWMCHASKWVTTCDFRWYGPKYITQSIRSFTPSVEQCKESIEQTKQGTWLNPGFPPQSCGYATVTDAEAVIVQVTPHHVLVDEYTGEWVDSQFINGKCSNYICPTVHNSTTWHSDYKVKGLCDSNLISMDITFFSEDGELSSLGKEGTGFRSNYFAYETGGKACKMQYCKHWGVRLPSGVWFEMADKDLFAAARFPECPEGSSISAPSQTSVDVSLIQDVERILDYSLCQETWSKIRAGLPISPVDLSYLAPKNPGTGPAFTIINGTLKYFETRYIRVDIAAPILSRMVGMISGTTTERELWDDWAPYEDVEIGPNGVLRTSSGYKFPLYMIGHGMLDSDLHLSSKAQVFEHPHIQDAASQLPDDES

SEQ ID NO: 78 - DNA, 6161 bp, synthetic construct
  source 1..6161: mol_type = other DNA
ggaattcgagctcgccccgttacataacttacggtaaatggcccgcctggctgaccgcccaacgacccccgcccattgacgtcaataatgacgtatgttcccatagtaacgccaatagggactttccattgacgtcaatgggtggagtatttacggtaaactgcccacttggcagtacatcaagtgtatcatatgccaagtacgccccctattgacgtcaatgacggtaaatggcccgcctggcattatgcccagtacatgaccttatgggactttcctacttggcagtacatctacgtattagtcatcgctattaccatggtgatgcggttttggcagtacatcaatgggcgtggatagcggtttgactcacggggatttccaagtctccaccccattgacgtcaatgggagtttgttttggcaccaaaatcaacgggactttccaaaatgtcgtaacaactccgccccattgacgcaaatgggcggtaggcgtgtacggtgggaggtctatataagcagagctcgtttagtgaaccgtcagatcgcctggagacgccatccacgctgttttgacctccatagaagacaccgggaccgatccagcctccgggggatcgatccccccgatcctgagaacttcagggtgagtttggggacccttgattgttctttctttttcgctattgtaaaattcatgttatatggagggggcaaagttttcagggtgttgtttagaatgggaagatgtcccttgtatcaccatggaccctcatgataattttgtttctttcactttctactctgttgacaaccattgtctcctcttattttcttttcattttctgtaactttttcgttaaactttagcttgcatttgtaacgaatttttaaattcacttttgtttatttgtcagattgtaagtactttctctaatcacttttttttcaaggcaatcagggtatattatattgtacttcagcacagttttagagaacaattgttataattaaatgataaggtagaatatttctgcatataaattctggctggcgtggaaatattcttattggtagaaacaactacatcctggtcatcatcctgcctttctctttatggttacaatgatatacactgtttgagatgaggataaaatactctgagtccaaaccgggcccctctgctaaccatgttcatgccttcttctttttcctacagctcctgggcaacgtgctggttattgtgctgtctcatcattttggcaaagaattgtaatacgactcactatagggcgaattcggatcccccggtagttaattaatacgcgtcactatgaagtgccttttgtacttagcctttttattcattggggtgaattgcgcccacatcgtgatggtggacgcctacaagcctaccaagaagttcacgatcgtttttccacacaaccaaaaaggaaactggaaaaatgttccttctaattaccattattgcccgtcaagctcagatttaaattggcataatgacttaataggcacagccttacaagtcaaaatgcccaagagtcacaaggctattcaagcagacggttggatgtgtcatgcttccaaatgggtcactacttgtgatttccgctggtatggaccgaagtatataacacattccatccgatccttcactccatctgtagaacaatgcaaggaaagcattgaacaaacgaaacaaggaacttggctgaatccaggcttccctcctcaaagttgtggatatgcaactgtgacggatgccgaagcagtgattgtccaggtgactcctcaccatgtgctggttgatgaatacacaggagaatgggttgattcacagttcatcaacggaaaatgcagcaattacatatgccccactgtccataactctacaacctggcattctgactataaggtcaaagggctatgtgattctaacctcatttccatggacatcaccttcttctcagaggacggagagctatcatccctgggaaaggagggcacagggttcagaagtaactactttgcttatgaaactggaggcaaggcctgcaaaatgcaatactgcaagcattggggagtcagactcccatcaggtgtctggttcgagatggctgataaggatctctttgctgcagccagattccctgaatgcccagaagggtcaagtatctctgctccatctcagacctcagtggatgtaagtctaattcaggacgttgagaggatcttggattattccctctgccaagaaacctggagcaaaatcagagcgggtcttccaatctctccagtggatctcagctatcttgctcctaaaaacccaggaaccggtcctgctttcaccataatcaatggtaccctaaaatactttgagaccagatacatcagagtcgatattgctgctccaatcctctcaagaatggtcggaatgatcagtggaactaccacagaaagggaactgtgggatgactgggcaccatatgaagacgtggaaattggacccaatggagttctgaggaccagttcaggatataagtttcctttatacatgattggacatggtatgttggactccgatcttcatcttagctcaaaggctcaggtgttcgaacatcctcacattcaagacgctgcttcgcaacttcctgatgatgagagtttattttttggtgatactgggctatccaaaaatccaatcgagcttgtagaaggttggttcagtagttggaaaagctctattgcctcttttttctttatcatagggttaatcattggactattcttggttctccgagttggtatccatctttgcattaaattaaagcacaccaagaaaagacagatttatacagacatagagatgaaccgacttggaaagtaactcaaatcctgctaggtatgaaaaaaactaacagatatcacgcctaggactagtgtgaaatagacatcagaattaagaaaaacgtagggtccaagtggttccccgttatggactcgctatctgtcaaccagatcttataccctgaagttcacctagatagcccgatagttaccaataagatagtagccatcctggagtatgctcgactgtttaaacctgcaggcatgcaagctgatctttttccctctgccaaaaattatggggacatcatgaagccccttgagcatctgacttctggctaataaaggaaatttattttcattgcaatagtgtgttggaattttttgtgtctctcactcggaaggacatatgggagggcaaatcatttaaaacatcagaatgagtatttggtttagagtttggcaacatatgcccatatgctggctgccatgaacaaaggttggctataaagaggtcatcagtatatgaaacagccccctgctgtccattccttattccatagaaaagccttgacttgaggttagattttttttatattttgttttgtgttatttttttctttaacatccctaaaattttccttacatgttttactagccagatttttcctcctctcctgactactcccagtcatagctgtccctcttctcttatggagatccctcgaggagctttttgcaaaagcctaggcctccaaaaaagcctcttcactacttctggaatagctcagaagccgaggcggcctcggcctctgcataaataaaaaaaattagtcagccatggggcggagaatgggcggaactgggcggagttaggggcgggatgggcggagttaggggcgggactatggttgctgactaattgctgcattaatgaatcggccaacgcgcggggagaggcggtttgcgtattgggcgctcttccgcttcctcgctcactgactcgctgcgctcggtcgttcggctgcggcgagcggtatcagctcactcaaaggcggtaatacggttatccacagaatcaggggataacgcaggaaagaacatgtgagcaaaaggccagcaaaaggccaggaaccgtaaaaaggccgcgttgctggcgtttttccataggctccgcccccctgacgagcatcacaaaaatcgacgctcaagtcagaggtggcgaaacccgacaggactataaagataccaggcgtttccccctggaagctccctcgtgcgctctcctgttccgaccctgccgcttaccggatacctgtccgcctttctcccttcgggaagcgtggcgctttctcatagctcacgctgtaggtatctcagttcggtgtaggtcgttcgctccaagctgggctgtgtgcacgaaccccccgttcagcccgaccgctgcgccttatccggtaactatcgtcttgagtccaacccggtaagacacgacttatcgccactggcagcagccactggtaacaggattagcagagcgaggtatgtaggcggtgctacagagttcttgaagtggtggcctaactacggctacactagaagaacagtatttggtatctgcgctctgctgaagccagttaccttcggaaaaagagttggtagctcttgatccggcaaacaaaccaccgctggtagcggtggtttttttgtttgcaagcagcagattacgcgcagaaaaaaaggatctcaagaagatcctttgatcttttctacggggtctgacgctcagtggaacgaaaactcacgttaagggattttggtcatgagattatcaaaaaggatcttcacctagatccttttaaattaaaaatgaagttttaaatcaatctaaagtatatatgagtaaacttggtctgacagttaccaatgcttaatcagtgaggcacctatctcagcgatctgtctatttcgttcatccatagttgcctgactccccgtcgtgtagataactacgatacgggagggcttaccatctggccccagtgctgcaatgataccgcgagacccacgctcaccggctccagatttatcagcaataaaccagccagccggaagggccgagcgcagaagtggtcctgcaactttatccgcctccatccagtctattaattgttgccgggaagctagagtaagtagttcgccagttaatagtttgcgcaacgttgttgccattgctacaggcatcgtggtgtcacgctcgtcgtttggtatggcttcattcagctccggttcccaacgatcaaggcgagttacatgatcccccatgttgtgcaaaaaagcggttagctccttcggtcctccgatcgttgtcagaagtaagttggccgcagtgttatcactcatggttatggcagcactgcataattctcttactgtcatgccatccgtaagatgcttttctgtgactggtgagtactcaaccaagtcattctgagaatagtgtatgcggcgaccgagttgctcttgcccggcgtcaatacgggataataccgcgccacatagcagaactttaaaagtgctcatcattggaaaacgttcttcggggcgaaaactctcaaggatcttaccgctgttgagatccagttcgatgtaacccactcgtgcacccaactgatcttcagcatcttttactttcaccagcgtttctgggtgagcaaaaacaggaaggcaaaatgccgcaaaaaagggaataagggcgacacggaaatgttgaatactcatactcttcctttttcaatattattgaagcatttatcagggttattgtctcatgagcggatacatatttgaatgtatttagaaaaataaacaaataggggttccgcgcacatttccccgaaaagtgccacctgacgtctaagaaaccattattatcatgacattaacctataaaaataggcgtatcacgaggccctttcgtctcgcgcgtttcggtgatgacggtgaaaacctctgacacatgcagctcccggagacggtcacagcttgtctgtaagcggatgccgggagcagacaagcccgtcagggcgcgtcagcgggtgttggcgggtgtcggggctggcttaactatgcggcatcagagcagattgtactgagagtgcaccattcgacgctctcccttatgcgactcctgcattaggaagcagcccagtagtaggttgaggccgttgagcaccgccgccgcaaggaatggtctggcttatcgaaattaatacgactcactatagggagacc

SEQ ID NO: 79 - DNA, 6161 bp, synthetic construct
  source 1..6161: mol_type = other DNA
ggaattcgagctcgccccgttacataacttacggtaaatggcccgcctggctgaccgcccaacgacccccgcccattgacgtcaataatgacgtatgttcccatagtaacgccaatagggactttccattgacgtcaatgggtggagtatttacggtaaactgcccacttggcagtacatcaagtgtatcatatgccaagtacgccccctattgacgtcaatgacggtaaatggcccgcctggcattatgcccagtacatgaccttatgggactttcctacttggcagtacatctacgtattagtcatcgctattaccatggtgatgcggttttggcagtacatcaatgggcgtggatagcggtttgactcacggggatttccaagtctccaccccattgacgtcaatgggagtttgttttggcaccaaaatcaacgggactttccaaaatgtcgtaacaactccgccccattgacgcaaatgggcggtaggcgtgtacggtgggaggtctatataagcagagctcgtttagtgaaccgtcagatcgcctggagacgccatccacgctgttttgacctccatagaagacaccgggaccgatccagcctccgggggatcgatccccccgatcctgagaacttcagggtgagtttggggacccttgattgttctttctttttcgctattgtaaaattcatgttatatggagggggcaaagttttcagggtgttgtttagaatgggaagatgtcccttgtatcaccatggaccctcatgataattttgtttctttcactttctactctgttgacaaccattgtctcctcttattttcttttcattttctgtaactttttcgttaaactttagcttgcatttgtaacgaatttttaaattcacttttgtttatttgtcagattgtaagtactttctctaatcacttttttttcaaggcaatcagggtatattatattgtacttcagcacagttttagagaacaattgttataattaaatgataaggtagaatatttctgcatataaattctggctggcgtggaaatattcttattggtagaaacaactacatcctggtcatcatcctgcctttctctttatggttacaatgatatacactgtttgagatgaggataaaatactctgagtccaaaccgggcccctctgctaaccatgttcatgccttcttctttttcctacagctcctgggcaacgtgctggttattgtgctgtctcatcattttggcaaagaattgtaatacgactcactatagggcgaattcggatcccccggtagttaattaatacgcgtcactatgaagtgccttttgtacttagcctttttattcattggggtgaattgcaagttcacgatcgtttttccacacaaccaaaaaggaaactggaaaaatgttccttctaattaccattattgcccgtcaagctcagatttaaattggcataatgcccacatcgtgatggtggacgcctacaagcctaccaaggacttaataggcacagccttacaagtcaaaatgcccaagagtcacaaggctattcaagcagacggttggatgtgtcatgcttccaaatgggtcactacttgtgatttccgctggtatggaccgaagtatataacacattccatccgatccttcactccatctgtagaacaatgcaaggaaagcattgaacaaacgaaacaaggaacttggctgaatccaggcttccctcctcaaagttgtggatatgcaactgtgacggatgccgaagcagtgattgtccaggtgactcctcaccatgtgctggttgatgaatacacaggagaatgggttgattcacagttcatcaacggaaaatgcagcaattacatatgccccactgtccataactctacaacctggcattctgactataaggtcaaagggctatgtgattctaacctcatttccatggacatcaccttcttctcagaggacggagagctatcatccctgggaaaggagggcacagggttcagaagtaactactttgcttatgaaactggaggcaaggcctgcaaaatgcaatactgcaagcattggggagtcagactcccatcaggtgtctggttcgagatggctgataaggatctctttgctgcagccagattccctgaatgcccagaagggtcaagtatctctgctccatctcagacctcagtggatgtaagtctaattcaggacgttgagaggatcttggattattccctctgccaagaaacctggagcaaaatcagagcgggtcttccaatctctccagtggatctcagctatcttgctcctaaaaacccaggaaccggtcctgctttcaccataatcaatggtaccctaaaatactttgagaccagatacatcagagtcgatattgctgctccaatcctctcaagaatggtcggaatgatcagtggaactaccacagaaagggaactgtgggatgactgggcaccatatgaagacgtggaaattggacccaatggagttctgaggaccagttcaggatataagtttcctttatacatgattggacatggtatgttggactccgatcttcatcttagctcaaaggctcaggtgttcgaacatcctcacattcaagacgctgcttcgcaacttcctgatgatgagagtttattttttggtgatactgggctatccaaaaatccaatcgagcttgtagaaggttggttcagtagttggaaaagctctattgcctcttttttctttatcatagggttaatcattggactattcttggttctccgagttggtatccatctttgcattaaattaaagcacaccaagaaaagacagatttatacagacatagagatgaaccgacttggaaagtaactcaaatcctgctaggtatgaaaaaaactaacagatatcacgcctaggactagtgtgaaatagacatcagaattaagaaaaacgtagggtccaagtggttccccgttatggactcgctatctgtcaaccagatcttataccctgaagttcacctagatagcccgatagttaccaataagatagtagccatcctggagtatgctcgactgtttaaacctgcaggcatgcaagctgatctttttccctctgccaaaaattatggggacatcatgaagccccttgagcatctgacttctggctaataaaggaaatttattttcattgcaatagtgtgttggaattttttgtgtctctcactcggaaggacatatgggagggcaaatcatttaaaacatcagaatgagtatttggtttagagtttggcaacatatgcccatatgctggctgccatgaacaaaggttggctataaagaggtcatcagtatatgaaacagccccctgctgtccattccttattccatagaaaagccttgacttgaggttagattttttttatattttgttttgtgttatttttttctttaacatccctaaaattttccttacatgttttactagccagatttttcctcctctcctgactactcccagtcatagctgtccctcttctcttatggagatccctcgaggagctttttgcaaaagcctaggcctccaaaaaagcctcttcactacttctggaatagctcagaagccgaggcggcctcggcctctgcataaataaaaaaaattagtcagccatggggcggagaatgggcggaactgggcggagttaggggcgggatgggcggagttaggggcgggactatggttgctgactaattgctgcattaatgaatcggccaacgcgcggggagaggcggtttgcgtattgggcgctcttccgcttcctcgctcactgactcgctgcgctcggtcgttcggctgcggcgagcggtatcagctcactcaaaggcggtaatacggttatccacagaatcaggggataacgcaggaaagaacatgtgagcaaaaggccagcaaaaggccaggaaccgtaaaaaggccgcgttgctggcgtttttccataggctccgcccccctgacgagcatcacaaaaatcgacgctcaagtcagaggtggcgaaacccgacaggactataaagataccaggcgtttccccctggaagctccctcgtgcgctctcctgttccgaccctgccgcttaccggatacctgtccgcctttctcccttcgggaagcgtggcgctttctcatagctcacgctgtaggtatctcagttcggtgtaggtcgttcgctccaagctgggctgtgtgcacgaaccccccgttcagcccgaccgctgcgccttatccggtaactatcgtcttgagtccaacccggtaagacacgacttatcgccactggcagcagccactggtaacaggattagcagagcgaggtatgtaggcggtgctacagagttcttgaagtggtggcctaactacggctacactagaagaacagtatttggtatctgcgctctgctgaagccagttaccttcggaaaaagagttggtagctcttgatccggcaaacaaaccaccgctggtagcggtggtttttttgtttgcaagcagcagattacgcgcagaaaaaaaggatctcaagaagatcctttgatcttttctacggggtctgacgctcagtggaacgaaaactcacgttaagggattttggtcatgagattatcaaaaaggatcttcacctagatccttttaaattaaaaatgaagttttaaatcaatctaaagtatatatgagtaaacttggtctgacagttaccaatgcttaatcagtgaggcacctatctcagcgatctgtctatttcgttcatccatagttgcctgactccccgtcgtgtagataactacgatacgggagggcttaccatctggccccagtgctgcaatgataccgcgagacccacgctcaccggctccagatttatcagcaataaaccagccagccggaagggccgagcgcagaagtggtcctgcaactttatccgcctccatccagtctattaattgttgccgggaagctagagtaagtagttcgccagttaatagtttgcgcaacgttgttgccattgctacaggcatcgtggtgtcacgctcgtcgtttggtatggcttcattcagctccggttcccaacgatcaaggcgagttacatgatcccccatgttgtgcaaaaaagcggttagctccttcggtcctccgatcgttgtcagaagtaagttggccgcagtgttatcactcatggttatggcagcactgcataattctcttactgtcatgccatccgtaagatgcttttctgtgactggtgagtactcaaccaagtcattctgagaatagtgtatgcggcgaccgagttgctcttgcccggcgtcaatacgggataataccgcgccacatagcagaactttaaaagtgctcatcattggaaaacgttcttcggggcgaaaactctcaaggatcttaccgctgttgagatccagttcgatgtaacccactcgtgcacccaactgatcttcagcatcttttactttcaccagcgtttctgggtgagcaaaaacaggaaggcaaaatgccgcaaaaaagggaataagggcgacacggaaatgttgaatactcatactcttcctttttcaatattattgaagcatttatcagggttattgtctcatgagcggatacatatttgaatgtatttagaaaaataaacaaataggggttccgcgcacatttccccgaaaagtgccacctgacgtctaagaaaccattattatcatgacattaacctataaaaataggcgtatcacgaggccctttcgtctcgcgcgtttcggtgatgacggtgaaaacctctgacacatgcagctcccggagacggtcacagcttgtctgtaagcggatgccgggagcagacaagcccgtcagggcgcgtcagcgggtgttggcgggtgtcggggctggcttaactatgcggcatcagagcagattgtactgagagtgcaccattcgacgctctcccttatgcgactcctgcattaggaagcagcccagtagtaggttgaggccgttgagcaccgccgccgcaaggaatggtctggcttatcgaaattaatacgactcactatagggagacc

SEQ ID NO: 80 - DNA, 6161 bp, synthetic construct
  source 1..6161: mol_type = other DNA
ggaattcgagctcgccccgttacataacttacggtaaatggcccgcctggctgaccgcccaacgacccccgcccattgacgtcaataatgacgtatgttcccatagtaacgccaatagggactttccattgacgtcaatgggtggagtatttacggtaaactgcccacttggcagtacatcaagtgtatcatatgccaagtacgccccctattgacgtcaatgacggtaaatggcccgcctggcattatgcccagtacatgaccttatgggactttcctacttggcagtacatctacgtattagtcatcgctattaccatggtgatgcggttttggcagtacatcaatgggcgtggatagcggtttgactcacggggatttccaagtctccaccccattgacgtcaatgggagtttgttttggcaccaaaatcaacgggactttccaaaatgtcgtaacaactccgccccattgacgcaaatgggcggtaggcgtgtacggtgggaggtctatataagcagagctcgtttagtgaaccgtcagatcgcctggagacgccatccacgctgttttgacctccatagaagacaccgggaccgatccagcctccgggggatcgatccccccgatcctgagaacttcagggtgagtttggggacccttgattgttctttctttttcgctattgtaaaattcatgttatatggagggggcaaagttttcagggtgttgtttagaatgggaagatgtcccttgtatcaccatggaccctcatgataattttgtttctttcactttctactctgttgacaaccattgtctcctcttattttcttttcattttctgtaactttttcgttaaactttagcttgcatttgtaacgaatttttaaattcacttttgtttatttgtcagattgtaagtactttctctaatcacttttttttcaaggcaatcagggtatattatattgtacttcagcacagttttagagaacaattgttataattaaatgataaggtagaatatttctgcatataaattctggctggcgtggaaatattcttattggtagaaacaactacatcctggtcatcatcctgcctttctctttatggttacaatgatatacactgtttgagatgaggataaaatactctgagtccaaaccgggcccctctgctaaccatgttcatgccttcttctttttcctacagctcctgggcaacgtgctggttattgtgctgtctcatcattttggcaaagaattgtaatacgactcactatagggcgaattcggatcccccggtagttaattaatacgcgtcactatgaagtgccttttgtacttagcctttttattcattggggtgaattgcaagttcacgatcgtttttccacacaaccaaaaaggaaactggaaaaatgttccttctaattaccattattgcccgtcaagctcagatttaaattggcataatgacttaataggcacagccttacaagtcaaaatgcccaagagtcacaaggctattcaagcagacggttggatgtgtcatgcttccaaatgggtcactacttgtgatttccgctggtatggaccgaagtatataacacattccatccgatccttcactccatctgtagaacaatgcaaggaaagcattgaacaaacgaaacaaggaacttggctgaatccaggcttccctcctcaaagttgtggatatgcaactgtgacggatgccgaagcagtgattgtccaggtgactcctcaccatgtgctggttgatgaatacacaggagaatgggttgattcacagttcatcaacggaaaatgcagcaattacatatgccccactgtccataactctacaacctggcattctgactataaggtcaaagcccacatcgtgatggtggacgcctacaagcctaccaaggggctatgtgattctaacctcatttccatggacatcaccttcttctcagaggacggagagctatcatccctgggaaaggagggcacagggttcagaagtaactactttgcttatgaaactggaggcaaggcctgcaaaatgcaatactgcaagcattggggagtcagactcccatcaggtgtctggttcgagatggctgataaggatctctttgctgcagccagattccctgaatgcccagaagggtcaagtatctctgctccatctcagacctcagtggatgtaagtctaattcaggacgttgagaggatcttggattattccctctgccaagaaacctggagcaaaatcagagcgggtcttccaatctctccagtggatctcagctatcttgctcctaaaaacccaggaaccggtcctgctttcaccataatcaatggtaccctaaaatactttgagaccagatacatcagagtcgatattgctgctccaatcctctcaagaatggtcggaatgatcagtggaactaccacagaaagggaactgtgggatgactgggcaccatatgaagacgtggaaattggacccaatggagttctgaggaccagttcaggatataagtttcctttatacatgattggacatggtatgttggactccgatcttcatcttagctcaaaggctcaggtgttcgaacatcctcacattcaagacgctgcttcgcaacttcctgatgatgagagtttattttttggtgatactgggctatccaaaaatccaatcgagcttgtagaaggttggttcagtagttggaaaagctctattgcctcttttttctttatcatagggttaatcattggactattcttggttctccgagttggtatccatctttgcattaaattaaagcacaccaagaaaagacagatttatacagacatagagatgaaccgacttggaaagtaactcaaatcctgctaggtatgaaaaaaactaacagatatcacgcctaggactagtgtgaaatagacatcagaattaagaaaaacgtagggtccaagtggttccccgttatggactcgctatctgtcaaccagatcttataccctgaagttcacctagatagcccgatagttaccaataagatagtagccatcctggagtatgctcgactgtttaaacctgcaggcatgcaagctgatctttttccctctgccaaaaattatggggacatcatgaagccccttgagcatctgacttctggctaataaaggaaatttattttcattgcaatagtgtgttggaattttttgtgtctctcactcggaaggacatatgggagggcaaatcatttaaaacatcagaatgagtatttggtttagagtttggcaacatatgcccatatgctggctgccatgaacaaaggttggctataaagaggtcatcagtatatgaaacagccccctgctgtccattccttattccatagaaaagccttgacttgaggttagattttttttatattttgttttgtgttatttttttctttaacatccctaaaattttccttacatgttttactagccagatttttcctcctctcctgactactcccagtcatagctgtccctcttctcttatggagatccctcgaggagctttttgcaaaagcctaggcctccaaaaaagcctcttcactacttctggaatagctcagaagccgaggcggcctcggcctctgcataaataaaaaaaattagtcagccatggggcggagaatgggcggaactgggcggagttaggggcgggatgggcggagttaggggcgggactatggttgctgactaattgctgcattaatgaatcggccaacgcgcggggagaggcggtttgcgtattgggcgctcttccgcttcctcgctcactgactcgctgcgctcggtcgttcggctgcggcgagcggtatcagctcactcaaaggcggtaatacggttatccacagaatcaggggataacgcaggaaagaacatgtgagcaaaaggccagcaaaaggccaggaaccgtaaaaaggccgcgttgctggcgtttttccataggctccgcccccctgacgagcatcacaaaaatcgacgctcaagtcagaggtggcgaaacccgacaggactataaagataccaggcgtttccccctggaagctccctcgtgcgctctcctgttccgaccctgccgcttaccggatacctgtccgcctttctcccttcgggaagcgtggcgctttctcatagctcacgctgtaggtatctcagttcggtgtaggtcgttcgctccaagctgggctgtgtgcacgaaccccccgttcagcccgaccgctgcgccttatccggtaactatcgtcttgagtccaacccggtaagacacgacttatcgccactggcagcagccactggtaacaggattagcagagcgaggtatgtaggcggtgctacagagttcttgaagtggtggcctaactacggctacactagaagaacagtatttggtatctgcgctctgctgaagccagttaccttcggaaaaagagttggtagctcttgatccggcaaacaaaccaccgctggtagcggtggtttttttgtttgcaagcagcagattacgcgcagaaaaaaaggatctcaagaagatcctttgatcttttctacggggtctgacgctcagtggaacgaaaactcacgttaagggattttggtcatgagattatcaaaaaggatcttcacctagatccttttaaattaaaaatgaagttttaaatcaatctaaagtatatatgagtaaacttggtctgacagttaccaatgcttaatcagtgaggcacctatctcagcgatctgtctatttcgttcatccatagttgcctgactccccgtcgtgtagataactacgatacgggagggcttaccatctggccccagtgctgcaatgataccgcgagacccacgctcaccggctccagatttatcagcaataaaccagccagccggaagggccgagcgcagaagtggtcctgcaactttatccgcctccatccagtctattaattgttgccgggaagctagagtaagtagttcgccagttaatagtttgcgcaacgttgttgccattgctacaggcatcgtggtgtcacgctcgtcgtttggtatggcttcattcagctccggttcccaacgatcaaggcgagttacatgatcccccatgttgtgcaaaaaagcggttagctccttcggtcctccgatcgttgtcagaagtaagttggccgcagtgttatcactcatggttatggcagcactgcataattctcttactgtcatgccatccgtaagatgcttttctgtgactggtgagtactcaaccaagtcattctgagaatagtgtatgcggcgaccgagttgctcttgcccggcgtcaatacgggataataccgcgccacatagcagaactttaaaagtgctcatcattggaaaacgttcttcggggcgaaaactctcaaggatcttaccgctgttgagatccagttcgatgtaacccactcgtgcacccaactgatcttcagcatcttttactttcaccagcgtttctgggtgagcaaaaacaggaaggcaaaatgccgcaaaaaagggaataagggcgacacggaaatgttgaatactcatactcttcctttttcaatattattgaagcatttatcagggttattgtctcatgagcggatacatatttgaatgtatttagaaaaataaacaaataggggttccgcgcacatttccccgaaaagtgccacctgacgtctaagaaaccattattatcatgacattaacctataaaaataggcgtatcacgaggccctttcgtctcgcgcgtttcggtgatgacggtgaaaacctctgacacatgcagctcccggagacggtcacagcttgtctgtaagcggatgccgggagcagacaagcccgtcagggcgcgtcagcgggtgttggcgggtgtcggggctggcttaactatgcggcatcagagcagattgtactgagagtgcaccattcgacgctctcccttatgcgactcctgcattaggaagcagcccagtagtaggttgaggccgttgagcaccgccgccgcaaggaatggtctggcttatcgaaattaatacgactcactatagggagacc

SEQ ID NO: 81 - DNA, 6161 bp, synthetic construct
  source 1..6161: mol_type = other DNA
ggaattcgagctcgccccgttacataacttacggtaaatggcccgcctggctgaccgcccaacgacccccgcccattgacgtcaataatgacgtatgttcccatagtaacgccaatagggactttccattgacgtcaatgggtggagtatttacggtaaactgcccacttggcagtacatcaagtgtatcatatgccaagtacgccccctattgacgtcaatgacggtaaatggcccgcctggcattatgcccagtacatgaccttatgggactttcctacttggcagtacatctacgtattagtcatcgctattaccatggtgatgcggttttggcagtacatcaatgggcgtggatagcggtttgactcacggggatttccaagtctccaccccattgacgtcaatgggagtttgttttggcaccaaaatcaacgggactttccaaaatgtcgtaacaactccgccccattgacgcaaatgggcggtaggcgtgtacggtgggaggtctatataagcagagctcgtttagtgaaccgtcagatcgcctggagacgccatccacgctgttttgacctccatagaagacaccgggaccgatccagcctccgggggatcgatccccccgatcctgagaacttcagggtgagtttggggacccttgattgttctttctttttcgctattgtaaaattcatgttatatggagggggcaaagttttcagggtgttgtttagaatgggaagatgtcccttgtatcaccatggaccctcatgataattttgtttctttcactttctactctgttgacaaccattgtctcctcttattttcttttcattttctgtaactttttcgttaaactttagcttgcatttgtaacgaatttttaaattcacttttgtttatttgtcagattgtaagtactttctctaatcacttttttttcaaggcaatcagggtatattatattgtacttcagcacagttttagagaacaattgttataattaaatgataaggtagaatatttctgcatataaattctggctggcgtggaaatattcttattggtagaaacaactacatcctggtcatcatcctgcctttctctttatggttacaatgatatacactgtttgagatgaggataaaatactctgagtccaaaccgggcccctctgctaaccatgttcatgccttcttctttttcctacagctcctgggcaacgtgctggttattgtgctgtctcatcattttggcaaagaattgtaatacgactcactatagggcgaattcggatcccccggtagttaattaatacgcgtcactatgaagtgccttttgtacttagcctttttattcattggggtgaattgcaagttcacgatcgtttttccacacaaccaaaaaggaaactggaaaaatgttccttctaattaccattattgcccgtcaagctcagatttaaattggcataatgacttaataggcacagccttacaagtcaaaatgcccaagagtcacaaggctattcaagcagacggttggatgtgtcatgcttccaaatgggtcactacttgtgatttccgctggtatggaccgaagtatataacacattccatccgatccttcactccatctgtagaacaatgcaaggaaagcattgaacaaacgaaacaaggaacttggctgaatccaggcttccctcctcaaagttgtggatatgcaactgtgacggatgccgaagcagtgattgtccaggtgactcctcaccatgtgctggttgatgaatacacaggagaatgggttgattcacagttcatcaacggaaaatgcagcaattacatatgccccactgtccataactctacaacctggcattctgactataaggtcaaagggctatgtgattctgcccacatcgtgatggtggacgcctacaagcctaccaagaacctcatttccatggacatcaccttcttctcagaggacggagagctatcatccctgggaaaggagggcacagggttcagaagtaactactttgcttatgaaactggaggcaaggcctgcaaaatgcaatactgcaagcattggggagtcagactcccatcaggtgtctggttcgagatggctgataaggatctctttgctgcagccagattccctgaatgcccagaagggtcaagtatctctgctccatctcagacctcagtggatgtaagtctaattcaggacgttgagaggatcttggattattccctctgccaagaaacctggagcaaaatcagagcgggtcttccaatctctccagtggatctcagctatcttgctcctaaaaacccaggaaccggtcctgctttcaccataatcaatggtaccctaaaatactttgagaccagatacatcagagtcgatattgctgctccaatcctctcaagaatggtcggaatgatcagtggaactaccacagaaagggaactgtgggatgactgggcaccatatgaagacgtggaaattggacccaatggagttctgaggaccagttcaggatataagtttcctttatacatgattggacatggtatgttggactccgatcttcatcttagctcaaaggctcaggtgttcgaacatcctcacattcaagacgctgcttcgcaacttcctgatgatgagagtttattttttggtgatactgggctatccaaaaatccaatcgagcttgtagaaggttggttcagtagttggaaaagctctattgcctcttttttctttatcatagggttaatcattggactattcttggttctccgagttggtatccatctttgcattaaattaaagcacaccaagaaaagacagatttatacagacatagagatgaaccgacttggaaagtaactcaaatcctgctaggtatgaaaaaaactaacagatatcacgcctaggactagtgtgaaatagacatcagaattaagaaaaacgtagggtccaagtggttccccgttatggactcgctatctgtcaaccagatcttataccctgaagttcacctagatagcccgatagttaccaataagatagtagccatcctggagtatgctcgactgtttaaacctgcaggcatgcaagctgatctttttccctctgccaaaaattatggggacatcatgaagccccttgagcatctgacttctggctaataaaggaaatttattttcattgcaatagtgtgttggaattttttgtgtctctcactcggaaggacatatgggagggcaaatcatttaaaacatcagaatgagtatttggtttagagtttggcaacatatgcccatatgctggctgccatgaacaaaggttggctataaagaggtcatcagtatatgaaacagccccctgctgtccattccttattccatagaaaagccttgacttgaggttagattttttttatattttgttttgtgttatttttttctttaacatccctaaaattttccttacatgttttactagccagatttttcctcctctcctgactactcccagtcatagctgtccctcttctcttatggagatccctcgaggagctttttgcaaaagcctaggcctccaaaaaagcctcttcactacttctggaatagctcagaagccgaggcggcctcggcctctgcataaataaaaaaaattagtcagccatggggcggagaatgggcggaactgggcggagttaggggcgggatgggcggagttaggggcgggactatggttgctgactaattgctgcattaatgaatcggccaacgcgcggggagaggcggtttgcgtattgggcgctcttccgcttcctcgctcactgactcgctgcgctcggtcgttcggctgcggcgagcggtatcagctcactcaaaggcggtaatacggttatccacagaatcaggggataacgcaggaaagaacatgtgagcaaaaggccagcaaaaggccaggaaccgtaaaaaggccgcgttgctggcgtttttccataggctccgcccccctgacgagcatcacaaaaatcgacgctcaagtcagaggtggcgaaacccgacaggactataaagataccaggcgtttccccctggaagctccctcgtgcgctctcctgttccgaccctgccgcttaccggatacctgtccgcctttctcccttcgggaagcgtggcgctttctcatagctcacgctgtaggtatctcagttcggtgtaggtcgttcgctccaagctgggctgtgtgcacgaaccccccgttcagcccgaccgctgcgccttatccggtaactatcgtcttgagtccaacccggtaagacacgacttatcgccactggcagcagccactggtaacaggattagcagagcgaggtatgtaggcggtgctacagagttcttgaagtggtggcctaactacggctacactagaagaacagtatttggtatctgcgctctgctgaagccagttaccttcggaaaaagagttggtagctcttgatccggcaaacaaaccaccgctggtagcggtggtttttttgtttgcaagcagcagattacgcgcagaaaaaaaggatctcaagaagatcctttgatcttttctacggggtctgacgctcagtggaacgaaaactcacgttaagggattttggtcatgagattatcaaaaaggatcttcacctagatccttttaaattaaaaatgaagttttaaatcaatctaaagtatatatgagtaaacttggtctgacagttaccaatgcttaatcagtgaggcacctatctcagcgatctgtctatttcgttcatccatagttgcctgactccccgtcgtgtagataactacgatacgggagggcttaccatctggccccagtgctgcaatgataccgcgagacccacgctcaccggctccagatttatcagcaataaaccagccagccggaagggccgagcgcagaagtggtcctgcaactttatccgcctccatccagtctattaattgttgccgggaagctagagtaagtagttcgccagttaatagtttgcgcaacgttgttgccattgctacaggcatcgtggtgtcacgctcgtcgtttggtatggcttcattcagctccggttcccaacgatcaaggcgagttacatgatcccccatgttgtgcaaaaaagcggttagctccttcggtcctccgatcgttgtcagaagtaagttggccgcagtgttatcactcatggttatggcagcactgcataattctcttactgtcatgccatccgtaagatgcttttctgtgactggtgagtactcaaccaagtcattctgagaatagtgtatgcggcgaccgagttgctcttgcccggcgtcaatacgggataataccgcgccacatagcagaactttaaaagtgctcatcattggaaaacgttcttcggggcgaaaactctcaaggatcttaccgctgttgagatccagttcgatgtaacccactcgtgcacccaactgatcttcagcatcttttactttcaccagcgtttctgggtgagcaaaaacaggaaggcaaaatgccgcaaaaaagggaataagggcgacacggaaatgttgaatactcatactcttcctttttcaatattattgaagcatttatcagggttattgtctcatgagcggatacatatttgaatgtatttagaaaaataaacaaataggggttccgcgcacatttccccgaaaagtgccacctgacgtctaagaaaccattattatcatgacattaacctataaaaataggcgtatcacgaggccctttcgtctcgcgcgtttcggtgatgacggtgaaaacctctgacacatgcagctcccggagacggtcacagcttgtctgtaagcggatgccgggagcagacaagcccgtcagggcgcgtcagcgggtgttggcgggtgtcggggctggcttaactatgcggcatcagagcagattgtactgagagtgcaccattcgacgctctcccttatgcgactcctgcattaggaagcagcccagtagtaggttgaggccgttgagcaccgccgccgcaaggaatggtctggcttatcgaaattaatacgactcactatagggagacc

SEQ ID NO: 82 - DNA, 6161 bp, synthetic construct
  source 1..6161: mol_type = other DNA
ggaattcgagctcgccccgttacataacttacggtaaatggcccgcctggctgaccgcccaacgacccccgcccattgacgtcaataatgacgtatgttcccatagtaacgccaatagggactttccattgacgtcaatgggtggagtatttacggtaaactgcccacttggcagtacatcaagtgtatcatatgccaagtacgccccctattgacgtcaatgacggtaaatggcccgcctggcattatgcccagtacatgaccttatgggactttcctacttggcagtacatctacgtattagtcatcgctattaccatggtgatgcggttttggcagtacatcaatgggcgtggatagcggtttgactcacggggatttccaagtctccaccccattgacgtcaatgggagtttgttttggcaccaaaatcaacgggactttccaaaatgtcgtaacaactccgccccattgacgcaaatgggcggtaggcgtgtacggtgggaggtctatataagcagagctcgtttagtgaaccgtcagatcgcctggagacgccatccacgctgttttgacctccatagaagacaccgggaccgatccagcctccgggggatcgatccccccgatcctgagaacttcagggtgagtttggggacccttgattgttctttctttttcgctattgtaaaattcatgttatatggagggggcaaagttttcagggtgttgtttagaatgggaagatgtcccttgtatcaccatggaccctcatgataattttgtttctttcactttctactctgttgacaaccattgtctcctcttattttcttttcattttctgtaactttttcgttaaactttagcttgcatttgtaacgaatttttaaattcacttttgtttatttgtcagattgtaagtactttctctaatcacttttttttcaaggcaatcagggtatattatattgtacttcagcacagttttagagaacaattgttataattaaatgataaggtagaatatttctgcatataaattctggctggcgtggaaatattcttattggtagaaacaactacatcctggtcatcatcctgcctttctctttatggttacaatgatatacactgtttgagatgaggataaaatactctgagtccaaaccgggcccctctgctaaccatgttcatgccttcttctttttcctacagctcctgggcaacgtgctggttattgtgctgtctcatcattttggcaaagaattgtaatacgactcactatagggcgaattcggatcccccggtagttaattaatacgcgtcactatgaagtgccttttgtacttagcctttttattcattggggtgaattgcaagttcacgatcgtttttccacacaaccaaaaaggaaactggaaaaatgttccttctaattaccattattgcccgtcaagctcagatttaaattggcataatgacttaataggcacagccttacaagtcaaaatgcccaagagtcacaaggctattcaagcagacggttggatgtgtcatgcttccaaatgggtcactacttgtgatttccgctggtatggaccgaagtatataacacattccatccgatccttcactccatctgtagaacaatgcaaggaaagcattgaacaaacgaaacaaggaacttggctgaatccaggcttccctcctcaaagttgtggatatgcaactgtgacggatgccgaagcagtgattgtccaggtgactcctcaccatgtgctggttgatgaatacacaggagaatgggttgattcacagttcatcaacggaaaatgcagcaattacatatgccccactgtccataactctacaacctggcattctgactataaggtcaaagggctatgtgattctaacctcatttccatggacatcaccttcttctcagaggacggagagctatcatccctgggaaaggcccacatcgtgatggtggacgcctacaagcctaccaaggagggcacagggttcagaagtaactactttgcttatgaaactggaggcaaggcctgcaaaatgcaatactgcaagcattggggagtcagactcccatcaggtgtctggttcgagatggctgataaggatctctttgctgcagccagattccctgaatgcccagaagggtcaagtatctctgctccatctcagacctcagtggatgtaagtctaattcaggacgttgagaggatcttggattattccctctgccaagaaacctggagcaaaatcagagcgggtcttccaatctctccagtggatctcagctatcttgctcctaaaaacccaggaaccggtcctgctttcaccataatcaatggtaccctaaaatactttgagaccagatacatcagagtcgatattgctgctccaatcctctcaagaatggtcggaatgatcagtggaactaccacagaaagggaactgtgggatgactgggcaccatatgaagacgtggaaattggacccaatggagttctgaggaccagttcaggatataagtttcctttatacatgattggacatggtatgttggactccgatcttcatcttagctcaaaggctcaggtgttcgaacatcctcacattcaagacgctgcttcgcaacttcctgatgatgagagtttattttttggtgatactgggctatccaaaaatccaatcgagcttgtagaaggttggttcagtagttggaaaagctctattgcctcttttttctttatcatagggttaatcattggactattcttggttctccgagttggtatccatctttgcattaaattaaagcacaccaagaaaagacagatttatacagacatagagatgaaccgacttggaaagtaactcaaatcctgctaggtatgaaaaaaactaacagatatcacgcctaggactagtgtgaaatagacatcagaattaagaaaaacgtagggtccaagtggttccccgttatggactcgctatctgtcaaccagatcttataccctgaagttcacctagatagcccgatagttaccaataagatagtagccatcctggagtatgctcgactgtttaaacctgcaggcatgcaagctgatctttttccctctgccaaaaattatggggacatcatgaagccccttgagcatctgacttctggctaataaaggaaatttattttcattgcaatagtgtgttggaattttttgtgtctctcactcggaaggacatatgggagggcaaatcatttaaaacatcagaatgagtatttggtttagagtttggcaacatatgcccatatgctggctgccatgaacaaaggttggctataaagaggtcatcagtatatgaaacagccccctgctgtccattccttattccatagaaaagccttgacttgaggttagattttttttatattttgttttgtgttatttttttctttaacatccctaaaattttccttacatgttttactagccagatttttcctcctctcctgactactcccagtcatagctgtccctcttctcttatggagatccctcgaggagctttttgcaaaagcctaggcctccaaaaaagcctcttcactacttctggaatagctcagaagccgaggcggcctcggcctctgcataaataaaaaaaattagtcagccatggggcggagaatgggcggaactgggcggagttaggggcgggatgggcggagttaggggcgggactatggttgctgactaattgctgcattaatgaatcggccaacgcgcggggagaggcggtttgcgtattgggcgctcttccgcttcctcgctcactgactcgctgcgctcggtcgttcggctgcggcgagcggtatcagctcactcaaaggcggtaatacggttatccacagaatcaggggataacgcaggaaagaacatgtgagcaaaaggccagcaaaaggccaggaaccgtaaaaaggccgcgttgctggcgtttttccataggctccgcccccctgacgagcatcacaaaaatcgacgctcaagtcagaggtggcgaaacccgacaggactataaagataccaggcgtttccccctggaagctccctcgtgcgctctcctgttccgaccctgccgcttaccggatacctgtccgcctttctcccttcgggaagcgtggcgctttctcatagctcacgctgtaggtatctcagttcggtgtaggtcgttcgctccaagctgggctgtgtgcacgaaccccccgttcagcccgaccgctgcgccttatccggtaactatcgtcttgagtccaacccggtaagacacgacttatcgccactggcagcagccactggtaacaggattagcagagcgaggtatgtaggcggtgctacagagttcttgaagtggtggcctaactacggctacactagaagaacagtatttggtatctgcgctctgctgaagccagttaccttcggaaaaagagttggtagctcttgatccggcaaacaaaccaccgctggtagcggtggtttttttgtttgcaagcagcagattacgcgcagaaaaaaaggatctcaagaagatcctttgatcttttctacggggtctgacgctcagtggaacgaaaactcacgttaagggattttggtcatgagattatcaaaaaggatcttcacctagatccttttaaattaaaaatgaagttttaaatcaatctaaagtatatatgagtaaacttggtctgacagttaccaatgcttaatcagtgaggcacctatctcagcgatctgtctatttcgttcatccatagttgcctgactccccgtcgtgtagataactacgatacgggagggcttaccatctggccccagtgctgcaatgataccgcgagacccacgctcaccggctccagatttatcagcaataaaccagccagccggaagggccgagcgcagaagtggtcctgcaactttatccgcctccatccagtctattaattgttgccgggaagctagagtaagtagttcgccagttaatagtttgcgcaacgttgttgccattgctacaggcatcgtggtgtcacgctcgtcgtttggtatggcttcattcagctccggttcccaacgatcaaggcgagttacatgatcccccatgttgtgcaaaaaagcggttagctccttcggtcctccgatcgttgtcagaagtaagttggccgcagtgttatcactcatggttatggcagcactgcataattctcttactgtcatgccatccgtaagatgcttttctgtgactggtgagtactcaaccaagtcattctgagaatagtgtatgcggcgaccgagttgctcttgcccggcgtcaatacgggataataccgcgccacatagcagaactttaaaagtgctcatcattggaaaacgttcttcggggcgaaaactctcaaggatcttaccgctgttgagatccagttcgatgtaacccactcgtgcacccaactgatcttcagcatcttttactttcaccagcgtttctgggtgagcaaaaacaggaaggcaaaatgccgcaaaaaagggaataagggcgacacggaaatgttgaatactcatactcttcctttttcaatattattgaagcatttatcagggttattgtctcatgagcggatacatatttgaatgtatttagaaaaataaacaaataggggttccgcgcacatttccccgaaaagtgccacctgacgtctaagaaaccattattatcatgacattaacctataaaaataggcgtatcacgaggccctttcgtctcgcgcgtttcggtgatgacggtgaaaacctctgacacatgcagctcccggagacggtcacagcttgtctgtaagcggatgccgggagcagacaagcccgtcagggcgcgtcagcgggtgttggcgggtgtcggggctggcttaactatgcggcatcagagcagattgtactgagagtgcaccattcgacgctctcccttatgcgactcctgcattaggaagcagcccagtagtaggttgaggccgttgagcaccgccgccgcaaggaatggtctggcttatcgaaattaatacgactcactatagggagacc

SEQ ID NO: 83 - DNA, 6161 bp, synthetic construct
  source 1..6161: mol_type = other DNA
ggaattcgagctcgccccgttacataacttacggtaaatggcccgcctggctgaccgcccaacgacccccgcccattgacgtcaataatgacgtatgttcccatagtaacgccaatagggactttccattgacgtcaatgggtggagtatttacggtaaactgcccacttggcagtacatcaagtgtatcatatgccaagtacgccccctattgacgtcaatgacggtaaatggcccgcctggcattatgcccagtacatgaccttatgggactttcctacttggcagtacatctacgtattagtcatcgctattaccatggtgatgcggttttggcagtacatcaatgggcgtggatagcggtttgactcacggggatttccaagtctccaccccattgacgtcaatgggagtttgttttggcaccaaaatcaacgggactttccaaaatgtcgtaacaactccgccccattgacgcaaatgggcggtaggcgtgtacggtgggaggtctatataagcagagctcgtttagtgaaccgtcagatcgcctggagacgccatccacgctgttttgacctccatagaagacaccgggaccgatccagcctccgggggatcgatccccccgatcctgagaacttcagggtgagtttggggacccttgattgttctttctttttcgctattgtaaaattcatgttatatggagggggcaaagttttcagggtgttgtttagaatgggaagatgtcccttgtatcaccatggaccctcatgataattttgtttctttcactttctactctgttgacaaccattgtctcctcttattttcttttcattttctgtaactttttcgttaaactttagcttgcatttgtaacgaatttttaaattcacttttgtttatttgtcagattgtaagtactttctctaatcacttttttttcaaggcaatcagggtatattatattgtacttcagcacagttttagagaacaattgttataattaaatgataaggtagaatatttctgcatataaattctggctggcgtggaaatattcttattggtagaaacaactacatcctggtcatcatcctgcctttctctttatggttacaatgatatacactgtttgagatgaggataaaatactctgagtccaaaccgggcccctctgctaaccatgttcatgccttcttctttttcctacagctcctgggcaacgtgctggttattgtgctgtctcatcattttggcaaagaattgtaatacgactcactatagggcgaattcggatcccccggtagttaattaatacgcgtcactatgaagtgccttttgtacttagcctttttattcattggggtgaattgcaagttcacgatcgtttttccacacaaccaaaaaggaaactggaaaaatgttccttctaattaccattattgcccgtcaagctcagatttaaattggcataatgacttaataggcacagccttacaagtcaaaatgcccaagagtcacaaggctattcaagcagacggttggatgtgtcatgcttccaaatgggtcactacttgtgatttccgctggtatggaccgaagtatataacacattccatccgatccttcactccatctgtagaacaatgcaaggaaagcattgaacaaacgaaacaaggaacttggctgaatccaggcttccctcctcaaagttgtggatatgcaactgtgacggatgccgaagcagtgattgtccaggtgactcctcaccatgtgctggttgatgaatacacaggagaatgggttgattcacagttcatcaacggaaaatgcagcaattacatatgccccactgtccataactctacaacctggcattctgactataaggtcaaagggctatgtgattctaacctcatttccatggacatcaccttcttctcagaggacggagagctatcatccctgggaaaggagggcacagggttcagaagtaactactttgcttatgaaactggaggcaaggcctgcaaaatgcaatactgcaagcattggggagtcagactcccatcaggtgtctggttcgagatggctgataaggatctctttgctgcagccagattccctgaatgcccagaagggtcaagtatctctgctccatctcagacctcagtggatgtaagtctaattcaggacgttgagaggatcttggattattccctctgccaagaaacctggagcaaaatcagagcgggtcttccaatctctccagtggatctcagctatcttgctcctaaaaacccaggaaccggtcctgctttcaccataatcaatggtaccctaaaatactttgagaccagatacatcagagtcgatattgctgctccaatcctctcaagaatggtcggaatgatcagtggaactaccgcccacatcgtgatggtggacgcctacaagcctaccaagacagaaagggaactgtgggatgactgggcaccatatgaagacgtggaaattggacccaatggagttctgaggaccagttcaggatataagtttcctttatacatgattggacatggtatgttggactccgatcttcatcttagctcaaaggctcaggtgttcgaacatcctcacattcaagacgctgcttcgcaacttcctgatgatgagagtttattttttggtgatactgggctatccaaaaatccaatcgagcttgtagaaggttggttcagtagttggaaaagctctattgcctcttttttctttatcatagggttaatcattggactattcttggttctccgagttggtatccatctttgcattaaattaaagcacaccaagaaaagacagatttatacagacatagagatgaaccgacttggaaagtaactcaaatcctgctaggtatgaaaaaaactaacagatatcacgcctaggactagtgtgaaatagacatcagaattaagaaaaacgtagggtccaagtggttccccgttatggactcgctatctgtcaaccagatcttataccctgaagttcacctagatagcccgatagttaccaataagatagtagccatcctggagtatgctcgactgtttaaacctgcaggcatgcaagctgatctttttccctctgccaaaaattatggggacatcatgaagccccttgagcatctgacttctggctaataaaggaaatttattttcattgcaatagtgtgttggaattttttgtgtctctcactcggaaggacatatgggagggcaaatcatttaaaacatcagaatgagtatttggtttagagtttggcaacatatgcccatatgctggctgccatgaacaaaggttggctataaagaggtcatcagtatatgaaacagccccctgctgtccattccttattccatagaaaagccttgacttgaggttagattttttttatattttgttttgtgttatttttttctttaacatccctaaaattttccttacatgttttactagccagatttttcctcctctcctgactactcccagtcatagctgtccctcttctcttatggagatccctcgaggagctttttgcaaaagcctaggcctccaaaaaagcctcttcactacttctggaatagctcagaagccgaggcggcctcggcctctgcataaataaaaaaaattagtcagccatggggcggagaatgggcggaactgggcggagttaggggcgggatgggcggagttaggggcgggactatggttgctgactaattgctgcattaatgaatcggccaacgcgcggggagaggcggtttgcgtattgggcgctcttccgcttcctcgctcactgactcgctgcgctcggtcgttcggctgcggcgagcggtatcagctcactcaaaggcggtaatacggttatccacagaatcaggggataacgcaggaaagaacatgtgagcaaaaggccagcaaaaggccaggaaccgtaaaaaggccgcgttgctggcgtttttccataggctccgcccccctgacgagcatcacaaaaatcgacgctcaagtcagaggtggcgaaacccgacaggactataaagataccaggcgtttccccctggaagctccctcgtgcgctctcctgttccgaccctgccgcttaccggatacctgtccgcctttctcccttcgggaagcgtggcgctttctcatagctcacgctgtaggtatctcagttcggtgtaggtcgttcgctccaagctgggctgtgtgcacgaaccccccgttcagcccgaccgctgcgccttatccggtaactatcgtcttgagtccaacccggtaagacacgacttatcgccactggcagcagccactggtaacaggattagcagagcgaggtatgtaggcggtgctacagagttcttgaagtggtggcctaactacggctacactagaagaacagtatttggtatctgcgctctgctgaagccagttaccttcggaaaaagagttggtagctcttgatccggcaaacaaaccaccgctggtagcggtggtttttttgtttgcaagcagcagattacgcgcagaaaaaaaggatctcaagaagatcctttgatcttttctacggggtctgacgctcagtggaacgaaaactcacgttaagggattttggtcatgagattatcaaaaaggatcttcacctagatccttttaaattaaaaatgaagttttaaatcaatctaaagtatatatgagtaaacttggtctgacagttaccaatgcttaatcagtgaggcacctatctcagcgatctgtctatttcgttcatccatagttgcctgactccccgtcgtgtagataactacgatacgggagggcttaccatctggccccagtgctgcaatgataccgcgagacccacgctcaccggctccagatttatcagcaataaaccagccagccggaagggccgagcgcagaagtggtcctgcaactttatccgcctccatccagtctattaattgttgccgggaagctagagtaagtagttcgccagttaatagtttgcgcaacgttgttgccattgctacaggcatcgtggtgtcacgctcgtcgtttggtatggcttcattcagctccggttcccaacgatcaaggcgagttacatgatcccccatgttgtgcaaaaaagcggttagctccttcggtcctccgatcgttgtcagaagtaagttggccgcagtgttatcactcatggttatggcagcactgcataattctcttactgtcatgccatccgtaagatgcttttctgtgactggtgagtactcaaccaagtcattctgagaatagtgtatgcggcgaccgagttgctcttgcccggcgtcaatacgggataataccgcgccacatagcagaactttaaaagtgctcatcattggaaaacgttcttcggggcgaaaactctcaaggatcttaccgctgttgagatccagttcgatgtaacccactcgtgcacccaactgatcttcagcatcttttactttcaccagcgtttctgggtgagcaaaaacaggaaggcaaaatgccgcaaaaaagggaataagggcgacacggaaatgttgaatactcatactcttcctttttcaatattattgaagcatttatcagggttattgtctcatgagcggatacatatttgaatgtatttagaaaaataaacaaataggggttccgcgcacatttccccgaaaagtgccacctgacgtctaagaaaccattattatcatgacattaacctataaaaataggcgtatcacgaggccctttcgtctcgcgcgtttcggtgatgacggtgaaaacctctgacacatgcagctcccggagacggtcacagcttgtctgtaagcggatgccgggagcagacaagcccgtcagggcgcgtcagcgggtgttggcgggtgtcggggctggcttaactatgcggcatcagagcagattgtactgagagtgcaccattcgacgctctcccttatgcgactcctgcattaggaagcagcccagtagtaggttgaggccgttgagcaccgccgccgcaaggaatggtctggcttatcgaaattaatacgactcactatagggagacc

SEQ ID NO: 84 - DNA, 6161 bp, synthetic construct
  source 1..6161: mol_type = other DNA
ggaattcgagctcgccccgttacataacttacggtaaatggcccgcctggctgaccgcccaacgacccccgcccattgacgtcaataatgacgtatgttcccatagtaacgccaatagggactttccattgacgtcaatgggtggagtatttacggtaaactgcccacttggcagtacatcaagtgtatcatatgccaagtacgccccctattgacgtcaatgacggtaaatggcccgcctggcattatgcccagtacatgaccttatgggactttcctacttggcagtacatctacgtattagtcatcgctattaccatggtgatgcggttttggcagtacatcaatgggcgtggatagcggtttgactcacggggatttccaagtctccaccccattgacgtcaatgggagtttgttttggcaccaaaatcaacgggactttccaaaatgtcgtaacaactccgccccattgacgcaaatgggcggtaggcgtgtacggtgggaggtctatataagcagagctcgtttagtgaaccgtcagatcgcctggagacgccatccacgctgttttgacctccatagaagacaccgggaccgatccagcctccgggggatcgatccccccgatcctgagaacttcagggtgagtttggggacccttgattgttctttctttttcgctattgtaaaattcatgttatatggagggggcaaagttttcagggtgttgtttagaatgggaagatgtcccttgtatcaccatggaccctcatgataattttgtttctttcactttctactctgttgacaaccattgtctcctcttattttcttttcattttctgtaactttttcgttaaactttagcttgcatttgtaacgaatttttaaattcacttttgtttatttgtcagattgtaagtactttctctaatcacttttttttcaaggcaatcagggtatattatattgtacttcagcacagttttagagaacaattgttataattaaatgataaggtagaatatttctgcatataaattctggctggcgtggaaatattcttattggtagaaacaactacatcctggtcatcatcctgcctttctctttatggttacaatgatatacactgtttgagatgaggataaaatactctgagtccaaaccgggcccctctgctaaccatgttcatgccttcttctttttcctacagctcctgggcaacgtgctggttattgtgctgtctcatcattttggcaaagaattgtaatacgactcactatagggcgaattcggatcccccggtagttaattaatacgcgtcactatgaagtgccttttgtacttagcctttttattcattggggtgaattgcaagttcacgatcgtttttccacacaaccaaaaaggaaactggaaaaatgttccttctaattaccattattgcccgtcaagctcagatttaaattggcataatgacttaataggcgcccacatcgtgatggtggacgcctacaagcctaccaagacagccttacaagtcaaaatgcccaagagtcacaaggctattcaagcagacggttggatgtgtcatgcttccaaatgggtcactacttgtgatttccgctggtatggaccgaagtatataacacattccatccgatccttcactccatctgtagaacaatgcaaggaaagcattgaacaaacgaaacaaggaacttggctgaatccaggcttccctcctcaaagttgtggatatgcaactgtgacggatgccgaagcagtgattgtccaggtgactcctcaccatgtgctggttgatgaatacacaggagaatgggttgattcacagttcatcaacggaaaatgcagcaattacatatgccccactgtccataactctacaacctggcattctgactataaggtcaaagggctatgtgattctaacctcatttccatggacatcaccttcttctcagaggacggagagctatcatccctgggaaaggagggcacagggttcagaagtaactactttgcttatgaaactggaggcaaggcctgcaaaatgcaatactgcaagcattggggagtcagactcccatcaggtgtctggttcgagatggctgataaggatctctttgctgcagccagattccctgaatgcccagaagggtcaagtatctctgctccatctcagacctcagtggatgtaagtctaattcaggacgttgagaggatcttggattattccctctgccaagaaacctggagcaaaatcagagcgggtcttccaatctctccagtggatctcagctatcttgctcctaaaaacccaggaaccggtcctgctttcaccataatcaatggtaccctaaaatactttgagaccagatacatcagagtcgatattgctgctccaatcctctcaagaatggtcggaatgatcagtggaactaccacagaaagggaactgtgggatgactgggcaccatatgaagacgtggaaattggacccaatggagttctgaggaccagttcaggatataagtttcctttatacatgattggacatggtatgttggactccgatcttcatcttagctcaaaggctcaggtgttcgaacatcctcacattcaagacgctgcttcgcaacttcctgatgatgagagtttattttttggtgatactgggctatccaaaaatccaatcgagcttgtagaaggttggttcagtagttggaaaagctctattgcctcttttttctttatcatagggttaatcattggactattcttggttctccgagttggtatccatctttgcattaaattaaagcacaccaagaaaagacagatttatacagacatagagatgaaccgacttggaaagtaactcaaatcctgctaggtatgaaaaaaactaacagatatcacgcctaggactagtgtgaaatagacatcagaattaagaaaaacgtagggtccaagtggttccccgttatggactcgctatctgtcaaccagatcttataccctgaagttcacctagatagcccgatagttaccaataagatagtagccatcctggagtatgctcgactgtttaaacctgcaggcatgcaagctgatctttttccctctgccaaaaattatggggacatcatgaagccccttgagcatctgacttctggctaataaaggaaatttattttcattgcaatagtgtgttggaattttttgtgtctctcactcggaaggacatatgggagggcaaatcatttaaaacatcagaatgagtatttggtttagagtttggcaacatatgcccatatgctggctgccatgaacaaaggttggctataaagaggtcatcagtatatgaaacagccccctgctgtccattccttattccatagaaaagccttgacttgaggttagattttttttatattttgttttgtgttatttttttctttaacatccctaaaattttccttacatgttttactagccagatttttcctcctctcctgactactcccagtcatagctgtccctcttctcttatggagatccctcgaggagctttttgcaaaagcctaggcctccaaaaaagcctcttcactacttctggaatagctcagaagccgaggcggcctcggcctctgcataaataaaaaaaattagtcagccatggggcggagaatgggcggaactgggcggagttaggggcgggatgggcggagttaggggcgggactatggttgctgactaattgctgcattaatgaatcggccaacgcgcggggagaggcggtttgcgtattgggcgctcttccgcttcctcgctcactgactcgctgcgctcggtcgttcggctgcggcgagcggtatcagctcactcaaaggcggtaatacggttatccacagaatcaggggataacgcaggaaagaacatgtgagcaaaaggccagcaaaaggccaggaaccgtaaaaaggccgcgttgctggcgtttttccataggctccgcccccctgacgagcatcacaaaaatcgacgctcaagtcagaggtggcgaaacccgacaggactataaagataccaggcgtttccccctggaagctccctcgtgcgctctcctgttccgaccctgccgcttaccggatacctgtccgcctttctcccttcgggaagcgtggcgctttctcatagctcacgctgtaggtatctcagttcggtgtaggtcgttcgctccaagctgggctgtgtgcacgaaccccccgttcagcccgaccgctgcgccttatccggtaactatcgtcttgagtccaacccggtaagacacgacttatcgccactggcagcagccactggtaacaggattagcagagcgaggtatgtaggcggtgctacagagttcttgaagtggtggcctaactacggctacactagaagaacagtatttggtatctgcgctctgctgaagccagttaccttcggaaaaagagttggtagctcttgatccggcaaacaaaccaccgctggtagcggtggtttttttgtttgcaagcagcagattacgcgcagaaaaaaaggatctcaagaagatcctttgatcttttctacggggtctgacgctcagtggaacgaaaactcacgttaagggattttggtcatgagattatcaaaaaggatcttcacctagatccttttaaattaaaaatgaagttttaaatcaatctaaagtatatatgagtaaacttggtctgacagttaccaatgcttaatcagtgaggcacctatctcagcgatctgtctatttcgttcatccatagttgcctgactccccgtcgtgtagataactacgatacgggagggcttaccatctggccccagtgctgcaatgataccgcgagacccacgctcaccggctccagatttatcagcaataaaccagccagccggaagggccgagcgcagaagtggtcctgcaactttatccgcctccatccagtctattaattgttgccgggaagctagagtaagtagttcgccagttaatagtttgcgcaacgttgttgccattgctacaggcatcgtggtgtcacgctcgtcgtttggtatggcttcattcagctccggttcccaacgatcaaggcgagttacatgatcccccatgttgtgcaaaaaagcggttagctccttcggtcctccgatcgttgtcagaagtaagttggccgcagtgttatcactcatggttatggcagcactgcataattctcttactgtcatgccatccgtaagatgcttttctgtgactggtgagtactcaaccaagtcattctgagaatagtgtatgcggcgaccgagttgctcttgcccggcgtcaatacgggataataccgcgccacatagcagaactttaaaagtgctcatcattggaaaacgttcttcggggcgaaaactctcaaggatcttaccgctgttgagatccagttcgatgtaacccactcgtgcacccaactgatcttcagcatcttttactttcaccagcgtttctgggtgagcaaaaacaggaaggcaaaatgccgcaaaaaagggaataagggcgacacggaaatgttgaatactcatactcttcctttttcaatattattgaagcatttatcagggttattgtctcatgagcggatacatatttgaatgtatttagaaaaataaacaaataggggttccgcgcacatttccccgaaaagtgccacctgacgtctaagaaaccattattatcatgacattaacctataaaaataggcgtatcacgaggccctttcgtctcgcgcgtttcggtgatgacggtgaaaacctctgacacatgcagctcccggagacggtcacagcttgtctgtaagcggatgccgggagcagacaagcccgtcagggcgcgtcagcgggtgttggcgggtgtcggggctggcttaactatgcggcatcagagcagattgtactgagagtgcaccattcgacgctctcccttatgcgactcctgcattaggaagcagcccagtagtaggttgaggccgttgagcaccgccgccgcaaggaatggtctggcttatcgaaattaatacgactcactatagggagacc

SEQ ID NO: 85 - DNA, 6179 bp, synthetic construct
  source 1..6179: mol_type = other DNA
ggaattcgagctcgccccgttacataacttacggtaaatggcccgcctggctgaccgcccaacgacccccgcccattgacgtcaataatgacgtatgttcccatagtaacgccaatagggactttccattgacgtcaatgggtggagtatttacggtaaactgcccacttggcagtacatcaagtgtatcatatgccaagtacgccccctattgacgtcaatgacggtaaatggcccgcctggcattatgcccagtacatgaccttatgggactttcctacttggcagtacatctacgtattagtcatcgctattaccatggtgatgcggttttggcagtacatcaatgggcgtggatagcggtttgactcacggggatttccaagtctccaccccattgacgtcaatgggagtttgttttggcaccaaaatcaacgggactttccaaaatgtcgtaacaactccgccccattgacgcaaatgggcggtaggcgtgtacggtgggaggtctatataagcagagctcgtttagtgaaccgtcagatcgcctggagacgccatccacgctgttttgacctccatagaagacaccgggaccgatccagcctccgggggatcgatccccccgatcctgagaacttcagggtgagtttggggacccttgattgttctttctttttcgctattgtaaaattcatgttatatggagggggcaaagttttcagggtgttgtttagaatgggaagatgtcccttgtatcaccatggaccctcatgataattttgtttctttcactttctactctgttgacaaccattgtctcctcttattttcttttcattttctgtaactttttcgttaaactttagcttgcatttgtaacgaatttttaaattcacttttgtttatttgtcagattgtaagtactttctctaatcacttttttttcaaggcaatcagggtatattatattgtacttcagcacagttttagagaacaattgttataattaaatgataaggtagaatatttctgcatataaattctggctggcgtggaaatattcttattggtagaaacaactacatcctggtcatcatcctgcctttctctttatggttacaatgatatacactgtttgagatgaggataaaatactctgagtccaaaccgggcccctctgctaaccatgttcatgccttcttctttttcctacagctcctgggcaacgtgctggttattgtgctgtctcatcattttggcaaagaattgtaatacgactcactatagggcgaattcggatcccccggtagttaattaatacgcgtcactatgaagtgccttttgtacttagcctttttattcattggggtgaattgcgcccacatcgtgatggtggatgcctataaaccaacaaagggcagcggcggctccggaaagttcacgatcgtttttccacacaaccaaaaaggaaactggaaaaatgttccttctaattaccattattgcccgtcaagctcagatttaaattggcataatgacttaataggcacagccttacaagtcaaaatgcccaagagtcacaaggctattcaagcagacggttggatgtgtcatgcttccaaatgggtcactacttgtgatttccgctggtatggaccgaagtatataacacattccatccgatccttcactccatctgtagaacaatgcaaggaaagcattgaacaaacgaaacaaggaacttggctgaatccaggcttccctcctcaaagttgtggatatgcaactgtgacggatgccgaagcagtgattgtccaggtgactcctcaccatgtgctggttgatgaatacacaggagaatgggttgattcacagttcatcaacggaaaatgcagcaattacatatgccccactgtccataactctacaacctggcattctgactataaggtcaaagggctatgtgattctaacctcatttccatggacatcaccttcttctcagaggacggagagctatcatccctgggaaaggagggcacagggttcagaagtaactactttgcttatgaaactggaggcaaggcctgcaaaatgcaatactgcaagcattggggagtcagactcccatcaggtgtctggttcgagatggctgataaggatctctttgctgcagccagattccctgaatgcccagaagggtcaagtatctctgctccatctcagacctcagtggatgtaagtctaattcaggacgttgagaggatcttggattattccctctgccaagaaacctggagcaaaatcagagcgggtcttccaatctctccagtggatctcagctatcttgctcctaaaaacccaggaaccggtcctgctttcaccataatcaatggtaccctaaaatactttgagaccagatacatcagagtcgatattgctgctccaatcctctcaagaatggtcggaatgatcagtggaactaccacagaaagggaactgtgggatgactgggcaccatatgaagacgtggaaattggacccaatggagttctgaggaccagttcaggatataagtttcctttatacatgattggacatggtatgttggactccgatcttcatcttagctcaaaggctcaggtgttcgaacatcctcacattcaagacgctgcttcgcaacttcctgatgatgagagtttattttttggtgatactgggctatccaaaaatccaatcgagcttgtagaaggttggttcagtagttggaaaagctctattgcctcttttttctttatcatagggttaatcattggactattcttggttctccgagttggtatccatctttgcattaaattaaagcacaccaagaaaagacagatttatacagacatagagatgaaccgacttggaaagtaactcaaatcctgctaggtatgaaaaaaactaacagatatcacgcctaggactagtgtgaaatagacatcagaattaagaaaaacgtagggtccaagtggttccccgttatggactcgctatctgtcaaccagatcttataccctgaagttcacctagatagcccgatagttaccaataagatagtagccatcctggagtatgctcgactgtttaaacctgcaggcatgcaagctgatctttttccctctgccaaaaattatggggacatcatgaagccccttgagcatctgacttctggctaataaaggaaatttattttcattgcaatagtgtgttggaattttttgtgtctctcactcggaaggacatatgggagggcaaatcatttaaaacatcagaatgagtatttggtttagagtttggcaacatatgcccatatgctggctgccatgaacaaaggttggctataaagaggtcatcagtatatgaaacagccccctgctgtccattccttattccatagaaaagccttgacttgaggttagattttttttatattttgttttgtgttatttttttctttaacatccctaaaattttccttacatgttttactagccagatttttcctcctctcctgactactcccagtcatagctgtccctcttctcttatggagatccctcgaggagctttttgcaaaagcctaggcctccaaaaaagcctcttcactacttctggaatagctcagaagccgaggcggcctcggcctctgcataaataaaaaaaattagtcagccatggggcggagaatgggcggaactgggcggagttaggggcgggatgggcggagttaggggcgggactatggttgctgactaattgctgcattaatgaatcggccaacgcgcggggagaggcggtttgcgtattgggcgctcttccgcttcctcgctcactgactcgctgcgctcggtcgttcggctgcggcgagcggtatcagctcactcaaaggcggtaatacggttatccacagaatcaggggataacgcaggaaagaacatgtgagcaaaaggccagcaaaaggccaggaaccgtaaaaaggccgcgttgctggcgtttttccataggctccgcccccctgacgagcatcacaaaaatcgacgctcaagtcagaggtggcgaaacccgacaggactataaagataccaggcgtttccccctggaagctccctcgtgcgctctcctgttccgaccctgccgcttaccggatacctgtccgcctttctcccttcgggaagcgtggcgctttctcatagctcacgctgtaggtatctcagttcggtgtaggtcgttcgctccaagctgggctgtgtgcacgaaccccccgttcagcccgaccgctgcgccttatccggtaactatcgtcttgagtccaacccggtaagacacgacttatcgccactggcagcagccactggtaacaggattagcagagcgaggtatgtaggcggtgctacagagttcttgaagtggtggcctaactacggctacactagaagaacagtatttggtatctgcgctctgctgaagccagttaccttcggaaaaagagttggtagctcttgatccggcaaacaaaccaccgctggtagcggtggtttttttgtttgcaagcagcagattacgcgcagaaaaaaaggatctcaagaagatcctttgatcttttctacggggtctgacgctcagtggaacgaaaactcacgttaagggattttggtcatgagattatcaaaaaggatcttcacctagatccttttaaattaaaaatgaagttttaaatcaatctaaagtatatatgagtaaacttggtctgacagttaccaatgcttaatcagtgaggcacctatctcagcgatctgtctatttcgttcatccatagttgcctgactccccgtcgtgtagataactacgatacgggagggcttaccatctggccccagtgctgcaatgataccgcgagacccacgctcaccggctccagatttatcagcaataaaccagccagccggaagggccgagcgcagaagtggtcctgcaactttatccgcctccatccagtctattaattgttgccgggaagctagagtaagtagttcgccagttaatagtttgcgcaacgttgttgccattgctacaggcatcgtggtgtcacgctcgtcgtttggtatggcttcattcagctccggttcccaacgatcaaggcgagttacatgatcccccatgttgtgcaaaaaagcggttagctccttcggtcctccgatcgttgtcagaagtaagttggccgcagtgttatcactcatggttatggcagcactgcataattctcttactgtcatgccatccgtaagatgcttttctgtgactggtgagtactcaaccaagtcattctgagaatagtgtatgcggcgaccgagttgctcttgcccggcgtcaatacgggataataccgcgccacatagcagaactttaaaagtgctcatcattggaaaacgttcttcggggcgaaaactctcaaggatcttaccgctgttgagatccagttcgatgtaacccactcgtgcacccaactgatcttcagcatcttttactttcaccagcgtttctgggtgagcaaaaacaggaaggcaaaatgccgcaaaaaagggaataagggcgacacggaaatgttgaatactcatactcttcctttttcaatattattgaagcatttatcagggttattgtctcatgagcggatacatatttgaatgtatttagaaaaataaacaaataggggttccgcgcacatttccccgaaaagtgccacctgacgtctaagaaaccattattatcatgacattaacctataaaaataggcgtatcacgaggccctttcgtctcgcgcgtttcggtgatgacggtgaaaacctctgacacatgcagctcccggagacggtcacagcttgtctgtaagcggatgccgggagcagacaagcccgtcagggcgcgtcagcgggtgttggcgggtgtcggggctggcttaactatgcggcatcagagcagattgtactgagagtgcaccattcgacgctctcccttatgcgactcctgcattaggaagcagcccagtagtaggttgaggccgttgagcaccgccgccgcaaggaatggtctggcttatcgaaattaatacgactcactatagggagacc

SEQ ID NO: 86 - DNA, 6197 bp, synthetic construct
  source 1..6197: mol_type = other DNA
ggaattcgagctcgccccgttacataacttacggtaaatggcccgcctggctgaccgcccaacgacccccgcccattgacgtcaataatgacgtatgttcccatagtaacgccaatagggactttccattgacgtcaatgggtggagtatttacggtaaactgcccacttggcagtacatcaagtgtatcatatgccaagtacgccccctattgacgtcaatgacggtaaatggcccgcctggcattatgcccagtacatgaccttatgggactttcctacttggcagtacatctacgtattagtcatcgctattaccatggtgatgcggttttggcagtacatcaatgggcgtggatagcggtttgactcacggggatttccaagtctccaccccattgacgtcaatgggagtttgttttggcaccaaaatcaacgggactttccaaaatgtcgtaacaactccgccccattgacgcaaatgggcggtaggcgtgtacggtgggaggtctatataagcagagctcgtttagtgaaccgtcagatcgcctggagacgccatccacgctgttttgacctccatagaagacaccgggaccgatccagcctccgggggatcgatccccccgatcctgagaacttcagggtgagtttggggacccttgattgttctttctttttcgctattgtaaaattcatgttatatggagggggcaaagttttcagggtgttgtttagaatgggaagatgtcccttgtatcaccatggaccctcatgataattttgtttctttcactttctactctgttgacaaccattgtctcctcttattttcttttcattttctgtaactttttcgttaaactttagcttgcatttgtaacgaatttttaaattcacttttgtttatttgtcagattgtaagtactttctctaatcacttttttttcaaggcaatcagggtatattatattgtacttcagcacagttttagagaacaattgttataattaaatgataaggtagaatatttctgcatataaattctggctggcgtggaaatattcttattggtagaaacaactacatcctggtcatcatcctgcctttctctttatggttacaatgatatacactgtttgagatgaggataaaatactctgagtccaaaccgggcccctctgctaaccatgttcatgccttcttctttttcctacagctcctgggcaacgtgctggttattgtgctgtctcatcattttggcaaagaattgtaatacgactcactatagggcgaattcggatcccccggtagttaattaatacgcgtcactatgaagtgccttttgtacttagcctttttattcattggggtgaattgcaagttcacgatcgtttttccacacaaccaaaaaggaaactggaaaaatgttccttctaattaccattattgcccgtcaagctcagatttaaattggcataatggcagcggcggaagcggcgcccacattgtgatggtggatgcctataaaccaacaaaaggctccggaggctctggagacttaataggcacagccttacaagtcaaaatgcccaagagtcacaaggctattcaagcagacggttggatgtgtcatgcttccaaatgggtcactacttgtgatttccgctggtatggaccgaagtatataacacattccatccgatccttcactccatctgtagaacaatgcaaggaaagcattgaacaaacgaaacaaggaacttggctgaatccaggcttccctcctcaaagttgtggatatgcaactgtgacggatgccgaagcagtgattgtccaggtgactcctcaccatgtgctggttgatgaatacacaggagaatgggttgattcacagttcatcaacggaaaatgcagcaattacatatgccccactgtccataactctacaacctggcattctgactataaggtcaaagggctatgtgattctaacctcatttccatggacatcaccttcttctcagaggacggagagctatcatccctgggaaaggagggcacagggttcagaagtaactactttgcttatgaaactggaggcaaggcctgcaaaatgcaatactgcaagcattggggagtcagactcccatcaggtgtctggttcgagatggctgataaggatctctttgctgcagccagattccctgaatgcccagaagggtcaagtatctctgctccatctcagacctcagtggatgtaagtctaattcaggacgttgagaggatcttggattattccctctgccaagaaacctggagcaaaatcagagcgggtcttccaatctctccagtggatctcagctatcttgctcctaaaaacccaggaaccggtcctgctttcaccataatcaatggtaccctaaaatactttgagaccagatacatcagagtcgatattgctgctccaatcctctcaagaatggtcggaatgatcagtggaactaccacagaaagggaactgtgggatgactgggcaccatatgaagacgtggaaattggacccaatggagttctgaggaccagttcaggatataagtttcctttatacatgattggacatggtatgttggactccgatcttcatcttagctcaaaggctcaggtgttcgaacatcctcacattcaagacgctgcttcgcaacttcctgatgatgagagtttattttttggtgatactgggctatccaaaaatccaatcgagcttgtagaaggttggttcagtagttggaaaagctctattgcctcttttttctttatcatagggttaatcattggactattcttggttctccgagttggtatccatctttgcattaaattaaagcacaccaagaaaagacagatttatacagacatagagatgaaccgacttggaaagtaactcaaatcctgctaggtatgaaaaaaactaacagatatcacgcctaggactagtgtgaaatagacatcagaattaagaaaaacgtagggtccaagtggttccccgttatggactcgctatctgtcaaccagatcttataccctgaagttcacctagatagcccgatagttaccaataagatagtagccatcctggagtatgctcgactgtttaaacctgcaggcatgcaagctgatctttttccctctgccaaaaattatggggacatcatgaagccccttgagcatctgacttctggctaataaaggaaatttattttcattgcaatagtgtgttggaattttttgtgtctctcactcggaaggacatatgggagggcaaatcatttaaaacatcagaatgagtatttggtttagagtttggcaacatatgcccatatgctggctgccatgaacaaaggttggctataaagaggtcatcagtatatgaaacagccccctgctgtccattccttattccatagaaaagccttgacttgaggttagattttttttatattttgttttgtgttatttttttctttaacatccctaaaattttccttacatgttttactagccagatttttcctcctctcctgactactcccagtcatagctgtccctcttctcttatggagatccctcgaggagctttttgcaaaagcctaggcctccaaaaaagcctcttcactacttctggaatagctcagaagccgaggcggcctcggcctctgcataaataaaaaaaattagtcagccatggggcggagaatgggcggaactgggcggagttaggggcgggatgggcggagttaggggcgggactatggttgctgactaattgctgcattaatgaatcggccaacgcgcggggagaggcggtttgcgtattgggcgctcttccgcttcctcgctcactgactcgctgcgctcggtcgttcggctgcggcgagcggtatcagctcactcaaaggcggtaatacggttatccacagaatcaggggataacgcaggaaagaacatgtgagcaaaaggccagcaaaaggccaggaaccgtaaaaaggccgcgttgctggcgtttttccataggctccgcccccctgacgagcatcacaaaaatcgacgctcaagtcagaggtggcgaaacccgacaggactataaagataccaggcgtttccccctggaagctccctcgtgcgctctcctgttccgaccctgccgcttaccggatacctgtccgcctttctcccttcgggaagcgtggcgctttctcatagctcacgctgtaggtatctcagttcggtgtaggtcgttcgctccaagctgggctgtgtgcacgaaccccccgttcagcccgaccgctgcgccttatccggtaactatcgtcttgagtccaacccggtaagacacgacttatcgccactggcagcagccactggtaacaggattagcagagcgaggtatgtaggcggtgctacagagttcttgaagtggtggcctaactacggctacactagaagaacagtatttggtatctgcgctctgctgaagccagttaccttcggaaaaagagttggtagctcttgatccggcaaacaaaccaccgctggtagcggtggtttttttgtttgcaagcagcagattacgcgcagaaaaaaaggatctcaagaagatcctttgatcttttctacggggtctgacgctcagtggaacgaaaactcacgttaagggattttggtcatgagattatcaaaaaggatcttcacctagatccttttaaattaaaaatgaagttttaaatcaatctaaagtatatatgagtaaacttggtctgacagttaccaatgcttaatcagtgaggcacctatctcagcgatctgtctatttcgttcatccatagttgcctgactccccgtcgtgtagataactacgatacgggagggcttaccatctggccccagtgctgcaatgataccgcgagacccacgctcaccggctccagatttatcagcaataaaccagccagccggaagggccgagcgcagaagtggtcctgcaactttatccgcctccatccagtctattaattgttgccgggaagctagagtaagtagttcgccagttaatagtttgcgcaacgttgttgccattgctacaggcatcgtggtgtcacgctcgtcgtttggtatggcttcattcagctccggttcccaacgatcaaggcgagttacatgatcccccatgttgtgcaaaaaagcggttagctccttcggtcctccgatcgttgtcagaagtaagttggccgcagtgttatcactcatggttatggcagcactgcataattctcttactgtcatgccatccgtaagatgcttttctgtgactggtgagtactcaaccaagtcattctgagaatagtgtatgcggcgaccgagttgctcttgcccggcgtcaatacgggataataccgcgccacatagcagaactttaaaagtgctcatcattggaaaacgttcttcggggcgaaaactctcaaggatcttaccgctgttgagatccagttcgatgtaacccactcgtgcacccaactgatcttcagcatcttttactttcaccagcgtttctgggtgagcaaaaacaggaaggcaaaatgccgcaaaaaagggaataagggcgacacggaaatgttgaatactcatactcttcctttttcaatattattgaagcatttatcagggttattgtctcatgagcggatacatatttgaatgtatttagaaaaataaacaaataggggttccgcgcacatttccccgaaaagtgccacctgacgtctaagaaaccattattatcatgacattaacctataaaaataggcgtatcacgaggccctttcgtctcgcgcgtttcggtgatgacggtgaaaacctctgacacatgcagctcccggagacggtcacagcttgtctgtaagcggatgccgggagcagacaagcccgtcagggcgcgtcagcgggtgttggcgggtgtcggggctggcttaactatgcggcatcagagcagattgtactgagagtgcaccattcgacgctctcccttatgcgactcctgcattaggaagcagcccagtagtaggttgaggccgttgagcaccgccgccgcaaggaatggtctggcttatcgaaattaatacgactcactatagggagacc

SEQ ID NO: 87 - DNA, 6197 bp, synthetic construct
  source 1..6197: mol_type = other DNA
ggaattcgagctcgccccgttacataacttacggtaaatggcccgcctggctgaccgcccaacgacccccgcccattgacgtcaataatgacgtatgttcccatagtaacgccaatagggactttccattgacgtcaatgggtggagtatttacggtaaactgcccacttggcagtacatcaagtgtatcatatgccaagtacgccccctattgacgtcaatgacggtaaatggcccgcctggcattatgcccagtacatgaccttatgggactttcctacttggcagtacatctacgtattagtcatcgctattaccatggtgatgcggttttggcagtacatcaatgggcgtggatagcggtttgactcacggggatttccaagtctccaccccattgacgtcaatgggagtttgttttggcaccaaaatcaacgggactttccaaaatgtcgtaacaactccgccccattgacgcaaatgggcggtaggcgtgtacggtgggaggtctatataagcagagctcgtttagtgaaccgtcagatcgcctggagacgccatccacgctgttttgacctccatagaagacaccgggaccgatccagcctccgggggatcgatccccccgatcctgagaacttcagggtgagtttggggacccttgattgttctttctttttcgctattgtaaaattcatgttatatggagggggcaaagttttcagggtgttgtttagaatgggaagatgtcccttgtatcaccatggaccctcatgataattttgtttctttcactttctactctgttgacaaccattgtctcctcttattttcttttcattttctgtaactttttcgttaaactttagcttgcatttgtaacgaatttttaaattcacttttgtttatttgtcagattgtaagtactttctctaatcacttttttttcaaggcaatcagggtatattatattgtacttcagcacagttttagagaacaattgttataattaaatgataaggtagaatatttctgcatataaattctggctggcgtggaaatattcttattggtagaaacaactacatcctggtcatcatcctgcctttctctttatggttacaatgatatacactgtttgagatgaggataaaatactctgagtccaaaccgggcccctctgctaaccatgttcatgccttcttctttttcctacagctcctgggcaacgtgctggttattgtgctgtctcatcattttggcaaagaattgtaatacgactcactatagggcgaattcggatcccccggtagttaattaatacgcgtcactatgaagtgccttttgtacttagcctttttattcattggggtgaattgcaagttcacgatcgtttttccacacaaccaaaaaggaaactggaaaaatgttccttctaattaccattattgcccgtcaagctcagatttaaattggcataatgacttaataggcacagccttacaagtcaaaatgcccaagagtcacaaggctattcaagcagacggttggatgtgtcatgcttccaaatgggtcactacttgtgatttccgctggtatggaccgaagtatataacacattccatccgatccttcactccatctgtagaacaatgcaaggaaagcattgaacaaacgaaacaaggaacttggctgaatccaggcttccctcctcaaagttgtggatatgcaactgtgacggatgccgaagcagtgattgtccaggtgactcctcaccatgtgctggttgatgaatacacaggagaatgggttgattcacagttcatcaacggaaaatgcagcaattacatatgccccactgtccataactctacaacctggcattctgactataaggtcaaaggcagcggcggaagcggcgcccacattgtgatggtggatgcctataaaccaacaaaaggctccggaggctctggagggctatgtgattctaacctcatttccatggacatcaccttcttctcagaggacggagagctatcatccctgggaaaggagggcacagggttcagaagtaactactttgcttatgaaactggaggcaaggcctgcaaaatgcaatactgcaagcattggggagtcagactcccatcaggtgtctggttcgagatggctgataaggatctctttgctgcagccagattccctgaatgcccagaagggtcaagtatctctgctccatctcagacctcagtggatgtaagtctaattcaggacgttgagaggatcttggattattccctctgccaagaaacctggagcaaaatcagagcgggtcttccaatctctccagtggatctcagctatcttgctcctaaaaacccaggaaccggtcctgctttcaccataatcaatggtaccctaaaatactttgagaccagatacatcagagtcgatattgctgctccaatcctctcaagaatggtcggaatgatcagtggaactaccacagaaagggaactgtgggatgactgggcaccatatgaagacgtggaaattggacccaatggagttctgaggaccagttcaggatataagtttcctttatacatgattggacatggtatgttggactccgatcttcatcttagctcaaaggctcaggtgttcgaacatcctcacattcaagacgctgcttcgcaacttcctgatgatgagagtttattttttggtgatactgggctatccaaaaatccaatcgagcttgtagaaggttggttcagtagttggaaaagctctattgcctcttttttctttatcatagggttaatcattggactattcttggttctccgagttggtatccatctttgcattaaattaaagcacaccaagaaaagacagatttatacagacatagagatgaaccgacttggaaagtaactcaaatcctgctaggtatgaaaaaaactaacagatatcacgcctaggactagtgtgaaatagacatcagaattaagaaaaacgtagggtccaagtggttccccgttatggactcgctatctgtcaaccagatcttataccctgaagttcacctagatagcccgatagttaccaataagatagtagccatcctggagtatgctcgactgtttaaacctgcaggcatgcaagctgatctttttccctctgccaaaaattatggggacatcatgaagccccttgagcatctgacttctggctaataaaggaaatttattttcattgcaatagtgtgttggaattttttgtgtctctcactcggaaggacatatgggagggcaaatcatttaaaacatcagaatgagtatttggtttagagtttggcaacatatgcccatatgctggctgccatgaacaaaggttggctataaagaggtcatcagtatatgaaacagccccctgctgtccattccttattccatagaaaagccttgacttgaggttagattttttttatattttgttttgtgttatttttttctttaacatccctaaaattttccttacatgttttactagccagatttttcctcctctcctgactactcccagtcatagctgtccctcttctcttatggagatccctcgaggagctttttgcaaaagcctaggcctccaaaaaagcctcttcactacttctggaatagctcagaagccgaggcggcctcggcctctgcataaataaaaaaaattagtcagccatggggcggagaatgggcggaactgggcggagttaggggcgggatgggcggagttaggggcgggactatggttgctgactaattgctgcattaatgaatcggccaacgcgcggggagaggcggtttgcgtattgggcgctcttccgcttcctcgctcactgactcgctgcgctcggtcgttcggctgcggcgagcggtatcagctcactcaaaggcggtaatacggttatccacagaatcaggggataacgcaggaaagaacatgtgagcaaaaggccagcaaaaggccaggaaccgtaaaaaggccgcgttgctggcgtttttccataggctccgcccccctgacgagcatcacaaaaatcgacgctcaagtcagaggtggcgaaacccgacaggactataaagataccaggcgtttccccctggaagctccctcgtgcgctctcctgttccgaccctgccgcttaccggatacctgtccgcctttctcccttcgggaagcgtggcgctttctcatagctcacgctgtaggtatctcagttcggtgtaggtcgttcgctccaagctgggctgtgtgcacgaaccccccgttcagcccgaccgctgcgccttatccggtaactatcgtcttgagtccaacccggtaagacacgacttatcgccactggcagcagccactggtaacaggattagcagagcgaggtatgtaggcggtgctacagagttcttgaagtggtggcctaactacggctacactagaagaacagtatttggtatctgcgctctgctgaagccagttaccttcggaaaaagagttggtagctcttgatccggcaaacaaaccaccgctggtagcggtggtttttttgtttgcaagcagcagattacgcgcagaaaaaaaggatctcaagaagatcctttgatcttttctacggggtctgacgctcagtggaacgaaaactcacgttaagggattttggtcatgagattatcaaaaaggatcttcacctagatccttttaaattaaaaatgaagttttaaatcaatctaaagtatatatgagtaaacttggtctgacagttaccaatgcttaatcagtgaggcacctatctcagcgatctgtctatttcgttcatccatagttgcctgactccccgtcgtgtagataactacgatacgggagggcttaccatctggccccagtgctgcaatgataccgcgagacccacgctcaccggctccagatttatcagcaataaaccagccagccggaagggccgagcgcagaagtggtcctgcaactttatccgcctccatccagtctattaattgttgccgggaagctagagtaagtagttcgccagttaatagtttgcgcaacgttgttgccattgctacaggcatcgtggtgtcacgctcgtcgtttggtatggcttcattcagctccggttcccaacgatcaaggcgagttacatgatcccccatgttgtgcaaaaaagcggttagctccttcggtcctccgatcgttgtcagaagtaagttggccgcagtgttatcactcatggttatggcagcactgcataattctcttactgtcatgccatccgtaagatgcttttctgtgactggtgagtactcaaccaagtcattctgagaatagtgtatgcggcgaccgagttgctcttgcccggcgtcaatacgggataataccgcgccacatagcagaactttaaaagtgctcatcattggaaaacgttcttcggggcgaaaactctcaaggatcttaccgctgttgagatccagttcgatgtaacccactcgtgcacccaactgatcttcagcatcttttactttcaccagcgtttctgggtgagcaaaaacaggaaggcaaaatgccgcaaaaaagggaataagggcgacacggaaatgttgaatactcatactcttcctttttcaatattattgaagcatttatcagggttattgtctcatgagcggatacatatttgaatgtatttagaaaaataaacaaataggggttccgcgcacatttccccgaaaagtgccacctgacgtctaagaaaccattattatcatgacattaacctataaaaataggcgtatcacgaggccctttcgtctcgcgcgtttcggtgatgacggtgaaaacctctgacacatgcagctcccggagacggtcacagcttgtctgtaagcggatgccgggagcagacaagcccgtcagggcgcgtcagcgggtgttggcgggtgtcggggctggcttaactatgcggcatcagagcagattgtactgagagtgcaccattcgacgctctcccttatgcgactcctgcattaggaagcagcccagtagtaggttgaggccgttgagcaccgccgccgcaaggaatggtctggcttatcgaaattaatacgactcactatagggagacc

SEQ ID NO: 88 - DNA, 6197 bp, synthetic construct
  source 1..6197: mol_type = other DNA
ggaattcgagctcgccccgttacataacttacggtaaatggcccgcctggctgaccgcccaacgacccccgcccattgacgtcaataatgacgtatgttcccatagtaacgccaatagggactttccattgacgtcaatgggtggagtatttacggtaaactgcccacttggcagtacatcaagtgtatcatatgccaagtacgccccctattgacgtcaatgacggtaaatggcccgcctggcattatgcccagtacatgaccttatgggactttcctacttggcagtacatctacgtattagtcatcgctattaccatggtgatgcggttttggcagtacatcaatgggcgtggatagcggtttgactcacggggatttccaagtctccaccccattgacgtcaatgggagtttgttttggcaccaaaatcaacgggactttccaaaatgtcgtaacaactccgccccattgacgcaaatgggcggtaggcgtgtacggtgggaggtctatataagcagagctcgtttagtgaaccgtcagatcgcctggagacgccatccacgctgttttgacctccatagaagacaccgggaccgatccagcctccgggggatcgatccccccgatcctgagaacttcagggtgagtttggggacccttgattgttctttctttttcgctattgtaaaattcatgttatatggagggggcaaagttttcagggtgttgtttagaatgggaagatgtcccttgtatcaccatggaccctcatgataattttgtttctttcactttctactctgttgacaaccattgtctcctcttattttcttttcattttctgtaactttttcgttaaactttagcttgcatttgtaacgaatttttaaattcacttttgtttatttgtcagattgtaagtactttctctaatcacttttttttcaaggcaatcagggtatattatattgtacttcagcacagttttagagaacaattgttataattaaatgataaggtagaatatttctgcatataaattctggctggcgtggaaatattcttattggtagaaacaactacatcctggtcatcatcctgcctttctctttatggttacaatgatatacactgtttgagatgaggataaaatactctgagtccaaaccgggcccctctgctaaccatgttcatgccttcttctttttcctacagctcctgggcaacgtgctggttattgtgctgtctcatcattttggcaaagaattgtaatacgactcactatagggcgaattcggatcccccggtagttaattaatacgcgtcactatgaagtgccttttgtacttagcctttttattcattggggtgaattgcaagttcacgatcgtttttccacacaaccaaaaaggaaactggaaaaatgttccttctaattaccattattgcccgtcaagctcagatttaaattggcataatgacttaataggcacagccttacaagtcaaaatgcccaagagtcacaaggctattcaagcagacggttggatgtgtcatgcttccaaatgggtcactacttgtgatttccgctggtatggaccgaagtatataacacattccatccgatccttcactccatctgtagaacaatgcaaggaaagcattgaacaaacgaaacaaggaacttggctgaatccaggcttccctcctcaaagttgtggatatgcaactgtgacggatgccgaagcagtgattgtccaggtgactcctcaccatgtgctggttgatgaatacacaggagaatgggttgattcacagttcatcaacggaaaatgcagcaattacatatgccccactgtccataactctacaacctggcattctgactataaggtcaaagggctatgtgattctggcagcggcggaagcggcgcccacattgtgatggtggatgcctataaaccaacaaaaggctccggaggctctggaaacctcatttccatggacatcaccttcttctcagaggacggagagctatcatccctgggaaaggagggcacagggttcagaagtaactactttgcttatgaaactggaggcaaggcctgcaaaatgcaatactgcaagcattggggagtcagactcccatcaggtgtctggttcgagatggctgataaggatctctttgctgcagccagattccctgaatgcccagaagggtcaagtatctctgctccatctcagacctcagtggatgtaagtctaattcaggacgttgagaggatcttggattattccctctgccaagaaacctggagcaaaatcagagcgggtcttccaatctctccagtggatctcagctatcttgctcctaaaaacccaggaaccggtcctgctttcaccataatcaatggtaccctaaaatactttgagaccagatacatcagagtcgatattgctgctccaatcctctcaagaatggtcggaatgatcagtggaactaccacagaaagggaactgtgggatgactgggcaccatatgaagacgtggaaattggacccaatggagttctgaggaccagttcaggatataagtttcctttatacatgattggacatggtatgttggactccgatcttcatcttagctcaaaggctcaggtgttcgaacatcctcacattcaagacgctgcttcgcaacttcctgatgatgagagtttattttttggtgatactgggctatccaaaaatccaatcgagcttgtagaaggttggttcagtagttggaaaagctctattgcctcttttttctttatcatagggttaatcattggactattcttggttctccgagttggtatccatctttgcattaaattaaagcacaccaagaaaagacagatttatacagacatagagatgaaccgacttggaaagtaactcaaatcctgctaggtatgaaaaaaactaacagatatcacgcctaggactagtgtgaaatagacatcagaattaagaaaaacgtagggtccaagtggttccccgttatggactcgctatctgtcaaccagatcttataccctgaagttcacctagatagcccgatagttaccaataagatagtagccatcctggagtatgctcgactgtttaaacctgcaggcatgcaagctgatctttttccctctgccaaaaattatggggacatcatgaagccccttgagcatctgacttctggctaataaaggaaatttattttcattgcaatagtgtgttggaattttttgtgtctctcactcggaaggacatatgggagggcaaatcatttaaaacatcagaatgagtatttggtttagagtttggcaacatatgcccatatgctggctgccatgaacaaaggttggctataaagaggtcatcagtatatgaaacagccccctgctgtccattccttattccatagaaaagccttgacttgaggttagattttttttatattttgttttgtgttatttttttctttaacatccctaaaattttccttacatgttttactagccagatttttcctcctctcctgactactcccagtcatagctgtccctcttctcttatggagatccctcgaggagctttttgcaaaagcctaggcctccaaaaaagcctcttcactacttctggaatagctcagaagccgaggcggcctcggcctctgcataaataaaaaaaattagtcagccatggggcggagaatgggcggaactgggcggagttaggggcgggatgggcggagttaggggcgggactatggttgctgactaattgctgcattaatgaatcggccaacgcgcggggagaggcggtttgcgtattgggcgctcttccgcttcctcgctcactgactcgctgcgctcggtcgttcggctgcggcgagcggtatcagctcactcaaaggcggtaatacggttatccacagaatcaggggataacgcaggaaagaacatgtgagcaaaaggccagcaaaaggccaggaaccgtaaaaaggccgcgttgctggcgtttttccataggctccgcccccctgacgagcatcacaaaaatcgacgctcaagtcagaggtggcgaaacccgacaggactataaagataccaggcgtttccccctggaagctccctcgtgcgctctcctgttccgaccctgccgcttaccggatacctgtccgcctttctcccttcgggaagcgtggcgctttctcatagctcacgctgtaggtatctcagttcggtgtaggtcgttcgctccaagctgggctgtgtgcacgaaccccccgttcagcccgaccgctgcgccttatccggtaactatcgtcttgagtccaacccggtaagacacgacttatcgccactggcagcagccactggtaacaggattagcagagcgaggtatgtaggcggtgctacagagttcttgaagtggtggcctaactacggctacactagaagaacagtatttggtatctgcgctctgctgaagccagttaccttcggaaaaagagttggtagctcttgatccggcaaacaaaccaccgctggtagcggtggtttttttgtttgcaagcagcagattacgcgcagaaaaaaaggatctcaagaagatcctttgatcttttctacggggtctgacgctcagtggaacgaaaactcacgttaagggattttggtcatgagattatcaaaaaggatcttcacctagatccttttaaattaaaaatgaagttttaaatcaatctaaagtatatatgagtaaacttggtctgacagttaccaatgcttaatcagtgaggcacctatctcagcgatctgtctatttcgttcatccatagttgcctgactccccgtcgtgtagataactacgatacgggagggcttaccatctggccccagtgctgcaatgataccgcgagacccacgctcaccggctccagatttatcagcaataaaccagccagccggaagggccgagcgcagaagtggtcctgcaactttatccgcctccatccagtctattaattgttgccgggaagctagagtaagtagttcgccagttaatagtttgcgcaacgttgttgccattgctacaggcatcgtggtgtcacgctcgtcgtttggtatggcttcattcagctccggttcccaacgatcaaggcgagttacatgatcccccatgttgtgcaaaaaagcggttagctccttcggtcctccgatcgttgtcagaagtaagttggccgcagtgttatcactcatggttatggcagcactgcataattctcttactgtcatgccatccgtaagatgcttttctgtgactggtgagtactcaaccaagtcattctgagaatagtgtatgcggcgaccgagttgctcttgcccggcgtcaatacgggataataccgcgccacatagcagaactttaaaagtgctcatcattggaaaacgttcttcggggcgaaaactctcaaggatcttaccgctgttgagatccagttcgatgtaacccactcgtgcacccaactgatcttcagcatcttttactttcaccagcgtttctgggtgagcaaaaacaggaaggcaaaatgccgcaaaaaagggaataagggcgacacggaaatgttgaatactcatactcttcctttttcaatattattgaagcatttatcagggttattgtctcatgagcggatacatatttgaatgtatttagaaaaataaacaaataggggttccgcgcacatttccccgaaaagtgccacctgacgtctaagaaaccattattatcatgacattaacctataaaaataggcgtatcacgaggccctttcgtctcgcgcgtttcggtgatgacggtgaaaacctctgacacatgcagctcccggagacggtcacagcttgtctgtaagcggatgccgggagcagacaagcccgtcagggcgcgtcagcgggtgttggcgggtgtcggggctggcttaactatgcggcatcagagcagattgtactgagagtgcaccattcgacgctctcccttatgcgactcctgcattaggaagcagcccagtagtaggttgaggccgttgagcaccgccgccgcaaggaatggtctggcttatcgaaattaatacgactcactatagggagacc

SEQ ID NO: 89 - DNA, 6197 bp, synthetic construct
  source 1..6197: mol_type = other DNA
ggaattcgagctcgccccgttacataacttacggtaaatggcccgcctggctgaccgcccaacgacccccgcccattgacgtcaataatgacgtatgttcccatagtaacgccaatagggactttccattgacgtcaatgggtggagtatttacggtaaactgcccacttggcagtacatcaagtgtatcatatgccaagtacgccccctattgacgtcaatgacggtaaatggcccgcctggcattatgcccagtacatgaccttatgggactttcctacttggcagtacatctacgtattagtcatcgctattaccatggtgatgcggttttggcagtacatcaatgggcgtggatagcggtttgactcacggggatttccaagtctccaccccattgacgtcaatgggagtttgttttggcaccaaaatcaacgggactttccaaaatgtcgtaacaactccgccccattgacgcaaatgggcggtaggcgtgtacggtgggaggtctatataagcagagctcgtttagtgaaccgtcagatcgcctggagacgccatccacgctgttttgacctccatagaagacaccgggaccgatccagcctccgggggatcgatccccccgatcctgagaacttcagggtgagtttggggacccttgattgttctttctttttcgctattgtaaaattcatgttatatggagggggcaaagttttcagggtgttgtttagaatgggaagatgtcccttgtatcaccatggaccctcatgataattttgtttctttcactttctactctgttgacaaccattgtctcctcttattttcttttcattttctgtaactttttcgttaaactttagcttgcatttgtaacgaatttttaaattcacttttgtttatttgtcagattgtaagtactttctctaatcacttttttttcaaggcaatcagggtatattatattgtacttcagcacagttttagagaacaattgttataattaaatgataaggtagaatatttctgcatataaattctggctggcgtggaaatattcttattggtagaaacaactacatcctggtcatcatcctgcctttctctttatggttacaatgatatacactgtttgagatgaggataaaatactctgagtccaaaccgggcccctctgctaaccatgttcatgccttcttctttttcctacagctcctgggcaacgtgctggttattgtgctgtctcatcattttggcaaagaattgtaatacgactcactatagggcgaattcggatcccccggtagttaattaatacgcgtcactatgaagtgccttttgtacttagcctttttattcattggggtgaattgcaagttcacgatcgtttttccacacaaccaaaaaggaaactggaaaaatgttccttctaattaccattattgcccgtcaagctcagatttaaattggcataatgacttaataggcacagccttacaagtcaaaatgcccaagagtcacaaggctattcaagcagacggttggatgtgtcatgcttccaaatgggtcactacttgtgatttccgctggtatggaccgaagtatataacacattccatccgatccttcactccatctgtagaacaatgcaaggaaagcattgaacaaacgaaacaaggaacttggctgaatccaggcttccctcctcaaagttgtggatatgcaactgtgacggatgccgaagcagtgattgtccaggtgactcctcaccatgtgctggttgatgaatacacaggagaatgggttgattcacagttcatcaacggaaaatgcagcaattacatatgccccactgtccataactctacaacctggcattctgactataaggtcaaagggctatgtgattctaacctcatttccatggacatcaccttcttctcagaggacggagagctatcatccctgggaaagggcagcggcggaagcggcgcccacattgtgatggtggatgcctataaaccaacaaaaggctccggaggctctggagagggcacagggttcagaagtaactactttgcttatgaaactggaggcaaggcctgcaaaatgcaatactgcaagcattggggagtcagactcccatcaggtgtctggttcgagatggctgataaggatctctttgctgcagccagattccctgaatgcccagaagggtcaagtatctctgctccatctcagacctcagtggatgtaagtctaattcaggacgttgagaggatcttggattattccctctgccaagaaacctggagcaaaatcagagcgggtcttccaatctctccagtggatctcagctatcttgctcctaaaaacccaggaaccggtcctgctttcaccataatcaatggtaccctaaaatactttgagaccagatacatcagagtcgatattgctgctccaatcctctcaagaatggtcggaatgatcagtggaactaccacagaaagggaactgtgggatgactgggcaccatatgaagacgtggaaattggacccaatggagttctgaggaccagttcaggatataagtttcctttatacatgattggacatggtatgttggactccgatcttcatcttagctcaaaggctcaggtgttcgaacatcctcacattcaagacgctgcttcgcaacttcctgatgatgagagtttattttttggtgatactgggctatccaaaaatccaatcgagcttgtagaaggttggttcagtagttggaaaagctctattgcctcttttttctttatcatagggttaatcattggactattcttggttctccgagttggtatccatctttgcattaaattaaagcacaccaagaaaagacagatttatacagacatagagatgaaccgacttggaaagtaactcaaatcctgctaggtatgaaaaaaactaacagatatcacgcctaggactagtgtgaaatagacatcagaattaagaaaaacgtagggtccaagtggttccccgttatggactcgctatctgtcaaccagatcttataccctgaagttcacctagatagcccgatagttaccaataagatagtagccatcctggagtatgctcgactgtttaaacctgcaggcatgcaagctgatctttttccctctgccaaaaattatggggacatcatgaagccccttgagcatctgacttctggctaataaaggaaatttattttcattgcaatagtgtgttggaattttttgtgtctctcactcggaaggacatatgggagggcaaatcatttaaaacatcagaatgagtatttggtttagagtttggcaacatatgcccatatgctggctgccatgaacaaaggttggctataaagaggtcatcagtatatgaaacagccccctgctgtccattccttattccatagaaaagccttgacttgaggttagattttttttatattttgttttgtgttatttttttctttaacatccctaaaattttccttacatgttttactagccagatttttcctcctctcctgactactcccagtcatagctgtccctcttctcttatggagatccctcgaggagctttttgcaaaagcctaggcctccaaaaaagcctcttcactacttctggaatagctcagaagccgaggcggcctcggcctctgcataaataaaaaaaattagtcagccatggggcggagaatgggcggaactgggcggagttaggggcgggatgggcggagttaggggcgggactatggttgctgactaattgctgcattaatgaatcggccaacgcgcggggagaggcggtttgcgtattgggcgctcttccgcttcctcgctcactgactcgctgcgctcggtcgttcggctgcggcgagcggtatcagctcactcaaaggcggtaatacggttatccacagaatcaggggataacgcaggaaagaacatgtgagcaaaaggccagcaaaaggccaggaaccgtaaaaaggccgcgttgctggcgtttttccataggctccgcccccctgacgagcatcacaaaaatcgacgctcaagtcagaggtggcgaaacccgacaggactataaagataccaggcgtttccccctggaagctccctcgtgcgctctcctgttccgaccctgccgcttaccggatacctgtccgcctttctcccttcgggaagcgtggcgctttctcatagctcacgctgtaggtatctcagttcggtgtaggtcgttcgctccaagctgggctgtgtgcacgaaccccccgttcagcccgaccgctgcgccttatccggtaactatcgtcttgagtccaacccggtaagacacgacttatcgccactggcagcagccactggtaacaggattagcagagcgaggtatgtaggcggtgctacagagttcttgaagtggtggcctaactacggctacactagaagaacagtatttggtatctgcgctctgctgaagccagttaccttcggaaaaagagttggtagctcttgatccggcaaacaaaccaccgctggtagcggtggtttttttgtttgcaagcagcagattacgcgcagaaaaaaaggatctcaagaagatcctttgatcttttctacggggtctgacgctcagtggaacgaaaactcacgttaagggattttggtcatgagattatcaaaaaggatcttcacctagatccttttaaattaaaaatgaagttttaaatcaatctaaagtatatatgagtaaacttggtctgacagttaccaatgcttaatcagtgaggcacctatctcagcgatctgtctatttcgttcatccatagttgcctgactccccgtcgtgtagataactacgatacgggagggcttaccatctggccccagtgctgcaatgataccgcgagacccacgctcaccggctccagatttatcagcaataaaccagccagccggaagggccgagcgcagaagtggtcctgcaactttatccgcctccatccagtctattaattgttgccgggaagctagagtaagtagttcgccagttaatagtttgcgcaacgttgttgccattgctacaggcatcgtggtgtcacgctcgtcgtttggtatggcttcattcagctccggttcccaacgatcaaggcgagttacatgatcccccatgttgtgcaaaaaagcggttagctccttcggtcctccgatcgttgtcagaagtaagttggccgcagtgttatcactcatggttatggcagcactgcataattctcttactgtcatgccatccgtaagatgcttttctgtgactggtgagtactcaaccaagtcattctgagaatagtgtatgcggcgaccgagttgctcttgcccggcgtcaatacgggataataccgcgccacatagcagaactttaaaagtgctcatcattggaaaacgttcttcggggcgaaaactctcaaggatcttaccgctgttgagatccagttcgatgtaacccactcgtgcacccaactgatcttcagcatcttttactttcaccagcgtttctgggtgagcaaaaacaggaaggcaaaatgccgcaaaaaagggaataagggcgacacggaaatgttgaatactcatactcttcctttttcaatattattgaagcatttatcagggttattgtctcatgagcggatacatatttgaatgtatttagaaaaataaacaaataggggttccgcgcacatttccccgaaaagtgccacctgacgtctaagaaaccattattatcatgacattaacctataaaaataggcgtatcacgaggccctttcgtctcgcgcgtttcggtgatgacggtgaaaacctctgacacatgcagctcccggagacggtcacagcttgtctgtaagcggatgccgggagcagacaagcccgtcagggcgcgtcagcgggtgttggcgggtgtcggggctggcttaactatgcggcatcagagcagattgtactgagagtgcaccattcgacgctctcccttatgcgactcctgcattaggaagcagcccagtagtaggttgaggccgttgagcaccgccgccgcaaggaatggtctggcttatcgaaattaatacgactcactatagggagacc

SEQ ID NO: 90 - DNA, 6197 bp, synthetic construct
  source 1..6197: mol_type = other DNA
ggaattcgagctcgccccgttacataacttacggtaaatggcccgcctggctgaccgcccaacgacccccgcccattgacgtcaataatgacgtatgttcccatagtaacgccaatagggactttccattgacgtcaatgggtggagtatttacggtaaactgcccacttggcagtacatcaagtgtatcatatgccaagtacgccccctattgacgtcaatgacggtaaatggcccgcctggcattatgcccagtacatgaccttatgggactttcctacttggcagtacatctacgtattagtcatcgctattaccatggtgatgcggttttggcagtacatcaatgggcgtggatagcggtttgactcacggggatttccaagtctccaccccattgacgtcaatgggagtttgttttggcaccaaaatcaacgggactttccaaaatgtcgtaacaactccgccccattgacgcaaatgggcggtaggcgtgtacggtgggaggtctatataagcagagctcgtttagtgaaccgtcagatcgcctggagacgccatccacgctgttttgacctccatagaagacaccgggaccgatccagcctccgggggatcgatccccccgatcctgagaacttcagggtgagtttggggacccttgattgttctttctttttcgctattgtaaaattcatgttatatggagggggcaaagttttcagggtgttgtttagaatgggaagatgtcccttgtatcaccatggaccctcatgataattttgtttctttcactttctactctgttgacaaccattgtctcctcttattttcttttcattttctgtaactttttcgttaaactttagcttgcatttgtaacgaatttttaaattcacttttgtttatttgtcagattgtaagtactttctctaatcacttttttttcaaggcaatcagggtatattatattgtacttcagcacagttttagagaacaattgttataattaaatgataaggtagaatatttctgcatataaattctggctggcgtggaaatattcttattggtagaaacaactacatcctggtcatcatcctgcctttctctttatggttacaatgatatacactgtttgagatgaggataaaatactctgagtccaaaccgggcccctctgctaaccatgttcatgccttcttctttttcctacagctcctgggcaacgtgctggttattgtgctgtctcatcattttggcaaagaattgtaatacgactcactatagggcgaattcggatcccccggtagttaattaatacgcgtcactatgaagtgccttttgtacttagcctttttattcattggggtgaattgcaagttcacgatcgtttttccacacaaccaaaaaggaaactggaaaaatgttccttctaattaccattattgcccgtcaagctcagatttaaattggcataatgacttaataggcacagccttacaagtcaaaatgcccaagagtcacaaggctattcaagcagacggttggatgtgtcatgcttccaaatgggtcactacttgtgatttccgctggtatggaccgaagtatataacacattccatccgatccttcactccatctgtagaacaatgcaaggaaagcattgaacaaacgaaacaaggaacttggctgaatccaggcttccctcctcaaagttgtggatatgcaactgtgacggatgccgaagcagtgattgtccaggtgactcctcaccatgtgctggttgatgaatacacaggagaatgggttgattcacagttcatcaacggaaaatgcagcaattacatatgccccactgtccataactctacaacctggcattctgactataaggtcaaagggctatgtgattctaacctcatttccatggacatcaccttcttctcagaggacggagagctatcatccctgggaaaggagggcacagggttcagaagtaactactttgcttatgaaactggaggcaaggcctgcaaaatgcaatactgcaagcattggggagtcagactcccatcaggtgtctggttcgagatggctgataaggatctctttgctgcagccagattccctgaatgcccagaagggtcaagtatctctgctccatctcagacctcagtggatgtaagtctaattcaggacgttgagaggatcttggattattccctctgccaagaaacctggagcaaaatcagagcgggtcttccaatctctccagtggatctcagctatcttgctcctaaaaacccaggaaccggtcctgctttcaccataatcaatggtaccctaaaatactttgagaccagatacatcagagtcgatattgctgctccaatcctctcaagaatggtcggaatgatcagtggaactaccggcagcggcggaagcggcgcccacattgtgatggtggatgcctataaaccaacaaaaggctccggaggctctggaacagaaagggaactgtgggatgactgggcaccatatgaagacgtggaaattggacccaatggagttctgaggaccagttcaggatataagtttcctttatacatgattggacatggtatgttggactccgatcttcatcttagctcaaaggctcaggtgttcgaacatcctcacattcaagacgctgcttcgcaacttcctgatgatgagagtttattttttggtgatactgggctatccaaaaatccaatcgagcttgtagaaggttggttcagtagttggaaaagctctattgcctcttttttctttatcatagggttaatcattggactattcttggttctccgagttggtatccatctttgcattaaattaaagcacaccaagaaaagacagatttatacagacatagagatgaaccgacttggaaagtaactcaaatcctgctaggtatgaaaaaaactaacagatatcacgcctaggactagtgtgaaatagacatcagaattaagaaaaacgtagggtccaagtggttccccgttatggactcgctatctgtcaaccagatcttataccctgaagttcacctagatagcccgatagttaccaataagatagtagccatcctggagtatgctcgactgtttaaacctgcaggcatgcaagctgatctttttccctctgccaaaaattatggggacatcatgaagccccttgagcatctgacttctggctaataaaggaaatttattttcattgcaatagtgtgttggaattttttgtgtctctcactcggaaggacatatgggagggcaaatcatttaaaacatcagaatgagtatttggtttagagtttggcaacatatgcccatatgctggctgccatgaacaaaggttggctataaagaggtcatcagtatatgaaacagccccctgctgtccattccttattccatagaaaagccttgacttgaggttagattttttttatattttgttttgtgttatttttttctttaacatccctaaaattttccttacatgttttactagccagatttttcctcctctcctgactactcccagtcatagctgtccctcttctcttatggagatccctcgaggagctttttgcaaaagcctaggcctccaaaaaagcctcttcactacttctggaatagctcagaagccgaggcggcctcggcctctgcataaataaaaaaaattagtcagccatggggcggagaatgggcggaactgggcggagttaggggcgggatgggcggagttaggggcgggactatggttgctgactaattgctgcattaatgaatcggccaacgcgcggggagaggcggtttgcgtattgggcgctcttccgcttcctcgctcactgactcgctgcgctcggtcgttcggctgcggcgagcggtatcagctcactcaaaggcggtaatacggttatccacagaatcaggggataacgcaggaaagaacatgtgagcaaaaggccagcaaaaggccaggaaccgtaaaaaggccgcgttgctggcgtttttccataggctccgcccccctgacgagcatcacaaaaatcgacgctcaagtcagaggtggcgaaacccgacaggactataaagataccaggcgtttccccctggaagctccctcgtgcgctctcctgttccgaccctgccgcttaccggatacctgtccgcctttctcccttcgggaagcgtggcgctttctcatagctcacgctgtaggtatctcagttcggtgtaggtcgttcgctccaagctgggctgtgtgcacgaaccccccgttcagcccgaccgctgcgccttatccggtaactatcgtcttgagtccaacccggtaagacacgacttatcgccactggcagcagccactggtaacaggattagcagagcgaggtatgtaggcggtgctacagagttcttgaagtggtggcctaactacggctacactagaagaacagtatttggtatctgcgctctgctgaagccagttaccttcggaaaaagagttggtagctcttgatccggcaaacaaaccaccgctggtagcggtggtttttttgtttgcaagcagcagattacgcgcagaaaaaaaggatctcaagaagatcctttgatcttttctacggggtctgacgctcagtggaacgaaaactcacgttaagggattttggtcatgagattatcaaaaaggatcttcacctagatccttttaaattaaaaatgaagttttaaatcaatctaaagtatatatgagtaaacttggtctgacagttaccaatgcttaatcagtgaggcacctatctcagcgatctgtctatttcgttcatccatagttgcctgactccccgtcgtgtagataactacgatacgggagggcttaccatctggccccagtgctgcaatgataccgcgagacccacgctcaccggctccagatttatcagcaataaaccagccagccggaagggccgagcgcagaagtggtcctgcaactttatccgcctccatccagtctattaattgttgccgggaagctagagtaagtagttcgccagttaatagtttgcgcaacgttgttgccattgctacaggcatcgtggtgtcacgctcgtcgtttggtatggcttcattcagctccggttcccaacgatcaaggcgagttacatgatcccccatgttgtgcaaaaaagcggttagctccttcggtcctccgatcgttgtcagaagtaagttggccgcagtgttatcactcatggttatggcagcactgcataattctcttactgtcatgccatccgtaagatgcttttctgtgactggtgagtactcaaccaagtcattctgagaatagtgtatgcggcgaccgagttgctcttgcccggcgtcaatacgggataataccgcgccacatagcagaactttaaaagtgctcatcattggaaaacgttcttcggggcgaaaactctcaaggatcttaccgctgttgagatccagttcgatgtaacccactcgtgcacccaactgatcttcagcatcttttactttcaccagcgtttctgggtgagcaaaaacaggaaggcaaaatgccgcaaaaaagggaataagggcgacacggaaatgttgaatactcatactcttcctttttcaatattattgaagcatttatcagggttattgtctcatgagcggatacatatttgaatgtatttagaaaaataaacaaataggggttccgcgcacatttccccgaaaagtgccacctgacgtctaagaaaccattattatcatgacattaacctataaaaataggcgtatcacgaggccctttcgtctcgcgcgtttcggtgatgacggtgaaaacctctgacacatgcagctcccggagacggtcacagcttgtctgtaagcggatgccgggagcagacaagcccgtcagggcgcgtcagcgggtgttggcgggtgtcggggctggcttaactatgcggcatcagagcagattgtactgagagtgcaccattcgacgctctcccttatgcgactcctgcattaggaagcagcccagtagtaggttgaggccgttgagcaccgccgccgcaaggaatggtctggcttatcgaaattaatacgactcactatagggagacc

SEQ ID NO: 91 - DNA, 6197 bp, synthetic construct
  source 1..6197: mol_type = other DNA
ggaattcgagctcgccccgttacataacttacggtaaatggcccgcctggctgaccgcccaacgacccccgcccattgacgtcaataatgacgtatgttcccatagtaacgccaatagggactttccattgacgtcaatgggtggagtatttacggtaaactgcccacttggcagtacatcaagtgtatcatatgccaagtacgccccctattgacgtcaatgacggtaaatggcccgcctggcattatgcccagtacatgaccttatgggactttcctacttggcagtacatctacgtattagtcatcgctattaccatggtgatgcggttttggcagtacatcaatgggcgtggatagcggtttgactcacggggatttccaagtctccaccccattgacgtcaatgggagtttgttttggcaccaaaatcaacgggactttccaaaatgtcgtaacaactccgccccattgacgcaaatgggcggtaggcgtgtacggtgggaggtctatataagcagagctcgtttagtgaaccgtcagatcgcctggagacgccatccacgctgttttgacctccatagaagacaccgggaccgatccagcctccgggggatcgatccccccgatcctgagaacttcagggtgagtttggggacccttgattgttctttctttttcgctattgtaaaattcatgttatatggagggggcaaagttttcagggtgttgtttagaatgggaagatgtcccttgtatcaccatggaccctcatgataattttgtttctttcactttctactctgttgacaaccattgtctcctcttattttcttttcattttctgtaactttttcgttaaactttagcttgcatttgtaacgaatttttaaattcacttttgtttatttgtcagattgtaagtactttctctaatcacttttttttcaaggcaatcagggtatattatattgtacttcagcacagttttagagaacaattgttataattaaatgataaggtagaatatttctgcatataaattctggctggcgtggaaatattcttattggtagaaacaactacatcctggtcatcatcctgcctttctctttatggttacaatgatatacactgtttgagatgaggataaaatactctgagtccaaaccgggcccctctgctaaccatgttcatgccttcttctttttcctacagctcctgggcaacgtgctggttattgtgctgtctcatcattttggcaaagaattgtaatacgactcactatagggcgaattcggatcccccggtagttaattaatacgcgtcactatgaagtgccttttgtacttagcctttttattcattggggtgaattgcaagttcacgatcgtttttccacacaaccaaaaaggaaactggaaaaatgttccttctaattaccattattgcccgtcaagctcagatttaaattggcataatgacttaataggcggcagcggcggaagcggcgcccacattgtgatggtggatgcctataaaccaacaaaaggctccggaggctctggaacagccttacaagtcaaaatgcccaagagtcacaaggctattcaagcagacggttggatgtgtcatgcttccaaatgggtcactacttgtgatttccgctggtatggaccgaagtatataacacattccatccgatccttcactccatctgtagaacaatgcaaggaaagcattgaacaaacgaaacaaggaacttggctgaatccaggcttccctcctcaaagttgtggatatgcaactgtgacggatgccgaagcagtgattgtccaggtgactcctcaccatgtgctggttgatgaatacacaggagaatgggttgattcacagttcatcaacggaaaatgcagcaattacatatgccccactgtccataactctacaacctggcattctgactataaggtcaaagggctatgtgattctaacctcatttccatggacatcaccttcttctcagaggacggagagctatcatccctgggaaaggagggcacagggttcagaagtaactactttgcttatgaaactggaggcaaggcctgcaaaatgcaatactgcaagcattggggagtcagactcccatcaggtgtctggttcgagatggctgataaggatctctttgctgcagccagattccctgaatgcccagaagggtcaagtatctctgctccatctcagacctcagtggatgtaagtctaattcaggacgttgagaggatcttggattattccctctgccaagaaacctggagcaaaatcagagcgggtcttccaatctctccagtggatctcagctatcttgctcctaaaaacccaggaaccggtcctgctttcaccataatcaatggtaccctaaaatactttgagaccagatacatcagagtcgatattgctgctccaatcctctcaagaatggtcggaatgatcagtggaactaccacagaaagggaactgtgggatgactgggcaccatatgaagacgtggaaattggacccaatggagttctgaggaccagttcaggatataagtttcctttatacatgattggacatggtatgttggactccgatcttcatcttagctcaaaggctcaggtgttcgaacatcctcacattcaagacgctgcttcgcaacttcctgatgatgagagtttattttttggtgatactgggctatccaaaaatccaatcgagcttgtagaaggttggttcagtagttggaaaagctctattgcctcttttttctttatcatagggttaatcattggactattcttggttctccgagttggtatccatctttgcattaaattaaagcacaccaagaaaagacagatttatacagacatagagatgaaccgacttggaaagtaactcaaatcctgctaggtatgaaaaaaactaacagatatcacgcctaggactagtgtgaaatagacatcagaattaagaaaaacgtagggtccaagtggttccccgttatggactcgctatctgtcaaccagatcttataccctgaagttcacctagatagcccgatagttaccaataagatagtagccatcctggagtatgctcgactgtttaaacctgcaggcatgcaagctgatctttttccctctgccaaaaattatggggacatcatgaagccccttgagcatctgacttctggctaataaaggaaatttattttcattgcaatagtgtgttggaattttttgtgtctctcactcggaaggacatatgggagggcaaatcatttaaaacatcagaatgagtatttggtttagagtttggcaacatatgcccatatgctggctgccatgaacaaaggttggctataaagaggtcatcagtatatgaaacagccccctgctgtccattccttattccatagaaaagccttgacttgaggttagattttttttatattttgttttgtgttatttttttctttaacatccctaaaattttccttacatgttttactagccagatttttcctcctctcctgactactcccagtcatagctgtccctcttctcttatggagatccctcgaggagctttttgcaaaagcctaggcctccaaaaaagcctcttcactacttctggaatagctcagaagccgaggcggcctcggcctctgcataaataaaaaaaattagtcagccatggggcggagaatgggcggaactgggcggagttaggggcgggatgggcggagttaggggcgggactatggttgctgactaattgctgcattaatgaatcggccaacgcgcggggagaggcggtttgcgtattgggcgctcttccgcttcctcgctcactgactcgctgcgctcggtcgttcggctgcggcgagcggtatcagctcactcaaaggcggtaatacggttatccacagaatcaggggataacgcaggaaagaacatgtgagcaaaaggccagcaaaaggccaggaaccgtaaaaaggccgcgttgctggcgtttttccataggctccgcccccctgacgagcatcacaaaaatcgacgctcaagtcagaggtggcgaaacccgacaggactataaagataccaggcgtttccccctggaagctccctcgtgcgctctcctgttccgaccctgccgcttaccggatacctgtccgcctttctcccttcgggaagcgtggcgctttctcatagctcacgctgtaggtatctcagttcggtgtaggtcgttcgctccaagctgggctgtgtgcacgaaccccccgttcagcccgaccgctgcgccttatccggtaactatcgtcttgagtccaacccggtaagacacgacttatcgccactggcagcagccactggtaacaggattagcagagcgaggtatgtaggcggtgctacagagttcttgaagtggtggcctaactacggctacactagaagaacagtatttggtatctgcgctctgctgaagccagttaccttcggaaaaagagttggtagctcttgatccggcaaacaaaccaccgctggtagcggtggtttttttgtttgcaagcagcagattacgcgcagaaaaaaaggatctcaagaagatcctttgatcttttctacggggtctgacgctcagtggaacgaaaactcacgttaagggattttggtcatgagattatcaaaaaggatcttcacctagatccttttaaattaaaaatgaagttttaaatcaatctaaagtatatatgagtaaacttggtctgacagttaccaatgcttaatcagtgaggcacctatctcagcgatctgtctatttcgttcatccatagttgcctgactccccgtcgtgtagataactacgatacgggagggcttaccatctggccccagtgctgcaatgataccgcgagacccacgctcaccggctccagatttatcagcaataaaccagccagccggaagggccgagcgcagaagtggtcctgcaactttatccgcctccatccagtctattaattgttgccgggaagctagagtaagtagttcgccagttaatagtttgcgcaacgttgttgccattgctacaggcatcgtggtgtcacgctcgtcgtttggtatggcttcattcagctccggttcccaacgatcaaggcgagttacatgatcccccatgttgtgcaaaaaagcggttagctccttcggtcctccgatcgttgtcagaagtaagttggccgcagtgttatcactcatggttatggcagcactgcataattctcttactgtcatgccatccgtaagatgcttttctgtgactggtgagtactcaaccaagtcattctgagaatagtgtatgcggcgaccgagttgctcttgcccggcgtcaatacgggataataccgcgccacatagcagaactttaaaagtgctcatcattggaaaacgttcttcggggcgaaaactctcaaggatcttaccgctgttgagatccagttcgatgtaacccactcgtgcacccaactgatcttcagcatcttttactttcaccagcgtttctgggtgagcaaaaacaggaaggcaaaatgccgcaaaaaagggaataagggcgacacggaaatgttgaatactcatactcttcctttttcaatattattgaagcatttatcagggttattgtctcatgagcggatacatatttgaatgtatttagaaaaataaacaaataggggttccgcgcacatttccccgaaaagtgccacctgacgtctaagaaaccattattatcatgacattaacctataaaaataggcgtatcacgaggccctttcgtctcgcgcgtttcggtgatgacggtgaaaacctctgacacatgcagctcccggagacggtcacagcttgtctgtaagcggatgccgggagcagacaagcccgtcagggcgcgtcagcgggtgttggcgggtgtcggggctggcttaactatgcggcatcagagcagattgtactgagagtgcaccattcgacgctctcccttatgcgactcctgcattaggaagcagcccagtagtaggttgaggccgttgagcaccgccgccgcaaggaatggtctggcttatcgaaattaatacgactcactatagggagacc

SEQ ID NO: 92 - DNA, 6170 bp, synthetic construct
  source 1..6170: mol_type = other DNA
ggaattcgagctcgccccgttacataacttacggtaaatggcccgcctggctgaccgcccaacgacccccgcccattgacgtcaataatgacgtatgttcccatagtaacgccaatagggactttccattgacgtcaatgggtggagtatttacggtaaactgcccacttggcagtacatcaagtgtatcatatgccaagtacgccccctattgacgtcaatgacggtaaatggcccgcctggcattatgcccagtacatgaccttatgggactttcctacttggcagtacatctacgtattagtcatcgctattaccatggtgatgcggttttggcagtacatcaatgggcgtggatagcggtttgactcacggggatttccaagtctccaccccattgacgtcaatgggagtttgttttggcaccaaaatcaacgggactttccaaaatgtcgtaacaactccgccccattgacgcaaatgggcggtaggcgtgtacggtgggaggtctatataagcagagctcgtttagtgaaccgtcagatcgcctggagacgccatccacgctgttttgacctccatagaagacaccgggaccgatccagcctccgggggatcgatccccccgatcctgagaacttcagggtgagtttggggacccttgattgttctttctttttcgctattgtaaaattcatgttatatggagggggcaaagttttcagggtgttgtttagaatgggaagatgtcccttgtatcaccatggaccctcatgataattttgtttctttcactttctactctgttgacaaccattgtctcctcttattttcttttcattttctgtaactttttcgttaaactttagcttgcatttgtaacgaatttttaaattcacttttgtttatttgtcagattgtaagtactttctctaatcacttttttttcaaggcaatcagggtatattatattgtacttcagcacagttttagagaacaattgttataattaaatgataaggtagaatatttctgcatataaattctggctggcgtggaaatattcttattggtagaaacaactacatcctggtcatcatcctgcctttctctttatggttacaatgatatacactgtttgagatgaggataaaatactctgagtccaaaccgggcccctctgctaaccatgttcatgccttcttctttttcctacagctcctgggcaacgtgctggttattgtgctgtctcatcattttggcaaagaattgtaatacgactcactatagggcgaattcggatcccccggtagttaattaatacgcgtcactatgaagtgccttttgtacttagcctttttattcattggggtgaattgcgcccacatcgtgatggtggatgcctataaaccaacaaagggcagcggcggctccggaaagttcacgatcgtttttccacacaaccaaaaaggaaactggaaaaatgttccttctaattaccattattgcccgtcaagctcagatttaaattggcataatgacttaataggcacagccttacaagtcaaaatgcccagtcacaaggctattcaagcagacggttggatgtgtcatgcttccaaatgggtcactacttgtgatttccgctggtatggaccgaagtatataacacattccatccgatccttcactccatctgtagaacaatgcaaggaaagcattgaacaaacgaaacaaggaacttggctgaatccaggcttccctcctcaaagttgtggatatgcaactgtgacggatgccgaagcagtgattgtccaggtgactcctcaccatgtgctggttgatgaatacacaggagaatgggttgattcacagttcatcaacggaaaatgcagcaattacatatgccccactgtccataactctacaacctggcattctgactataaggtcaaagggctatgtgattctaacctcatttccatggacatcaccttcttctcagaggacggagagctatcatccctgggaaaggagggcacagggttcagaagtaactactttgctgaaactggaggcaaggcctgcaaaatgcaatactgcaagcattggggagtcagactcccatcaggtgtctggttcgagatggctgataaggatctctttgctgcagccagattccctgaatgcccagaagggtcaagtatctctgctccatctcagacctcagtggatgtaagtctaattcaggacgttgagaggatcttggattattccctctgccaagaaacctggagcaaaatcagagcgggtcttccaatctctccagtggatctcagctatcttgctcctaaaaacccaggaaccggtcctgctttcaccataatcaatggtaccctaaaatactttgagaccagatacatcagagtcgatattgctgctccaatcctctcaagaatggtcggaatgatcagtggaactaccacagaagaactgtgggatgactgggcaccatatgaagacgtggaaattggacccaatggagttctgaggaccagttcaggatataagtttcctttatacatgattggacatggtatgttggactccgatcttcatcttagctcaaaggctcaggtgttcgaacatcctcacattcaagacgctgcttcgcaacttcctgatgatgagagtttattttttggtgatactgggctatccaaaaatccaatcgagcttgtagaaggttggttcagtagttggaaaagctctattgcctcttttttctttatcatagggttaatcattggactattcttggttctccgagttggtatccatctttgcattaaattaaagcacaccaagaaaagacagatttatacagacatagagatgaaccgacttggaaagtaactcaaatcctgctaggtatgaaaaaaactaacagatatcacgcctaggactagtgtgaaatagacatcagaattaagaaaaacgtagggtccaagtggttccccgttatggactcgctatctgtcaaccagatcttataccctgaagttcacctagatagcccgatagttaccaataagatagtagccatcctggagtatgctcgactgtttaaacctgcaggcatgcaagctgatctttttccctctgccaaaaattatggggacatcatgaagccccttgagcatctgacttctggctaataaaggaaatttattttcattgcaatagtgtgttggaattttttgtgtctctcactcggaaggacatatgggagggcaaatcatttaaaacatcagaatgagtatttggtttagagtttggcaacatatgcccatatgctggctgccatgaacaaaggttggctataaagaggtcatcagtatatgaaacagccccctgctgtccattccttattccatagaaaagccttgacttgaggttagattttttttatattttgttttgtgttatttttttctttaacatccctaaaattttccttacatgttttactagccagatttttcctcctctcctgactactcccagtcatagctgtccctcttctcttatggagatccctcgaggagctttttgcaaaagcctaggcctccaaaaaagcctcttcactacttctggaatagctcagaagccgaggcggcctcggcctctgcataaataaaaaaaattagtcagccatggggcggagaatgggcggaactgggcggagttaggggcgggatgggcggagttaggggcgggactatggttgctgactaattgctgcattaatgaatcggccaacgcgcggggagaggcggtttgcgtattgggcgctcttccgcttcctcgctcactgactcgctgcgctcggtcgttcggctgcggcgagcggtatcagctcactcaaaggcggtaatacggttatccacagaatcaggggataacgcaggaaagaacatgtgagcaaaaggccagcaaaaggccaggaaccgtaaaaaggccgcgttgctggcgtttttccataggctccgcccccctgacgagcatcacaaaaatcgacgctcaagtcagaggtggcgaaacccgacaggactataaagataccaggcgtttccccctggaagctccctcgtgcgctctcctgttccgaccctgccgcttaccggatacctgtccgcctttctcccttcgggaagcgtggcgctttctcatagctcacgctgtaggtatctcagttcggtgtaggtcgttcgctccaagctgggctgtgtgcacgaaccccccgttcagcccgaccgctgcgccttatccggtaactatcgtcttgagtccaacccggtaagacacgacttatcgccactggcagcagccactggtaacaggattagcagagcgaggtatgtaggcggtgctacagagttcttgaagtggtggcctaactacggctacactagaagaacagtatttggtatctgcgctctgctgaagccagttaccttcggaaaaagagttggtagctcttgatccggcaaacaaaccaccgctggtagcggtggtttttttgtttgcaagcagcagattacgcgcagaaaaaaaggatctcaagaagatcctttgatcttttctacggggtctgacgctcagtggaacgaaaactcacgttaagggattttggtcatgagattatcaaaaaggatcttcacctagatccttttaaattaaaaatgaagttttaaatcaatctaaagtatatatgagtaaacttggtctgacagttaccaatgcttaatcagtgaggcacctatctcagcgatctgtctatttcgttcatccatagttgcctgactccccgtcgtgtagataactacgatacgggagggcttaccatctggccccagtgctgcaatgataccgcgagacccacgctcaccggctccagatttatcagcaataaaccagccagccggaagggccgagcgcagaagtggtcctgcaactttatccgcctccatccagtctattaattgttgccgggaagctagagtaagtagttcgccagttaatagtttgcgcaacgttgttgccattgctacaggcatcgtggtgtcacgctcgtcgtttggtatggcttcattcagctccggttcccaacgatcaaggcgagttacatgatcccccatgttgtgcaaaaaagcggttagctccttcggtcctccgatcgttgtcagaagtaagttggccgcagtgttatcactcatggttatggcagcactgcataattctcttactgtcatgccatccgtaagatgcttttctgtgactggtgagtactcaaccaagtcattctgagaatagtgtatgcggcgaccgagttgctcttgcccggcgtcaatacgggataataccgcgccacatagcagaactttaaaagtgctcatcattggaaaacgttcttcggggcgaaaactctcaaggatcttaccgctgttgagatccagttcgatgtaacccactcgtgcacccaactgatcttcagcatcttttactttcaccagcgtttctgggtgagcaaaaacaggaaggcaaaatgccgcaaaaaagggaataagggcgacacggaaatgttgaatactcatactcttcctttttcaatattattgaagcatttatcagggttattgtctcatgagcggatacatatttgaatgtatttagaaaaataaacaaataggggttccgcgcacatttccccgaaaagtgccacctgacgtctaagaaaccattattatcatgacattaacctataaaaataggcgtatcacgaggccctttcgtctcgcgcgtttcggtgatgacggtgaaaacctctgacacatgcagctcccggagacggtcacagcttgtctgtaagcggatgccgggagcagacaagcccgtcagggcgcgtcagcgggtgttggcgggtgtcggggctggcttaactatgcggcatcagagcagattgtactgagagtgcaccattcgacgctctcccttatgcgactcctgcattaggaagcagcccagtagtaggttgaggccgttgagcaccgccgccgcaaggaatggtctggcttatcgaaattaatacgactcactatagggagacc

SEQ ID NO: 93 - DNA, 6179 bp, synthetic construct
  source 1..6179: mol_type = other DNA
ggaattcgagctcgccccgttacataacttacggtaaatggcccgcctggctgaccgcccaacgacccccgcccattgacgtcaataatgacgtatgttcccatagtaacgccaatagggactttccattgacgtcaatgggtggagtatttacggtaaactgcccacttggcagtacatcaagtgtatcatatgccaagtacgccccctattgacgtcaatgacggtaaatggcccgcctggcattatgcccagtacatgaccttatgggactttcctacttggcagtacatctacgtattagtcatcgctattaccatggtgatgcggttttggcagtacatcaatgggcgtggatagcggtttgactcacggggatttccaagtctccaccccattgacgtcaatgggagtttgttttggcaccaaaatcaacgggactttccaaaatgtcgtaacaactccgccccattgacgcaaatgggcggtaggcgtgtacggtgggaggtctatataagcagagctcgtttagtgaaccgtcagatcgcctggagacgccatccacgctgttttgacctccatagaagacaccgggaccgatccagcctccgggggatcgatccccccgatcctgagaacttcagggtgagtttggggacccttgattgttctttctttttcgctattgtaaaattcatgttatatggagggggcaaagttttcagggtgttgtttagaatgggaagatgtcccttgtatcaccatggaccctcatgataattttgtttctttcactttctactctgttgacaaccattgtctcctcttattttcttttcattttctgtaactttttcgttaaactttagcttgcatttgtaacgaatttttaaattcacttttgtttatttgtcagattgtaagtactttctctaatcacttttttttcaaggcaatcagggtatattatattgtacttcagcacagttttagagaacaattgttataattaaatgataaggtagaatatttctgcatataaattctggctggcgtggaaatattcttattggtagaaacaactacatcctggtcatcatcctgcctttctctttatggttacaatgatatacactgtttgagatgaggataaaatactctgagtccaaaccgggcccctctgctaaccatgttcatgccttcttctttttcctacagctcctgggcaacgtgctggttattgtgctgtctcatcattttggcaaagaattgtaatacgactcactatagggcgaattcggatcccccggtagttaattaatacgcgtcactatgaagtgccttttgtacttagcctttttattcattggggtgaattgcgcccacatcgtgatggtggatgcctataaaccaacaaagggcagcggcggctccggaaagttcacgatcgtttttccacacaaccaaaaaggaaactggaaaaatgttccttctaattaccattattgcccgtcaagctcagatttaaattggcataatgacttaataggcacagccttacaagtcaaaatgccccagagtcacaaggctattcaagcagacggttggatgtgtcatgcttccaaatgggtcactacttgtgatttccgctggtatggaccgaagtatataacacattccatccgatccttcactccatctgtagaacaatgcaaggaaagcattgaacaaacgaaacaaggaacttggctgaatccaggcttccctcctcaaagttgtggatatgcaactgtgacggatgccgaagcagtgattgtccaggtgactcctcaccatgtgctggttgatgaatacacaggagaatgggttgattcacagttcatcaacggaaaatgcagcaattacatatgccccactgtccataactctacaacctggcattctgactataaggtcaaagggctatgtgattctaacctcatttccatggacatcaccttcttctcagaggacggagagctatcatccctgggaaaggagggcacagggttcagaagtaaccaatttgcttatgaaactggaggcaaggcctgcaaaatgcaatactgcaagcattggggagtcagactcccatcaggtgtctggttcgagatggctgataaggatctctttgctgcagccagattccctgaatgcccagaagggtcaagtatctctgctccatctcagacctcagtggatgtaagtctaattcaggacgttgagaggatcttggattattccctctgccaagaaacctggagcaaaatcagagcgggtcttccaatctctccagtggatctcagctatcttgctcctaaaaacccaggaaccggtcctgctttcaccataatcaatggtaccctaaaatactttgagaccagatacatcagagtcgatattgctgctccaatcctctcaagaatggtcggaatgatctccggaactaccacagaacaggaactgtgggatgactgggcgccatatgaagacgtggaaattggacccaatggagttctgaggaccagttcaggatataagtttcctttatacatgattggacatggtatgttggactccgatcttcatcttagctcaaaggctcaggtgttcgaacatcctcacattcaagacgctgcttcgcaacttcctgatgatgagagtttattttttggtgatactgggctatccaaaaatccaatcgagcttgtagaaggttggttcagtagttggaaaagctctattgcctcttttttctttatcatagggttaatcattggactattcttggttctccgagttggtatccatctttgcattaaattaaagcacaccaagaaaagacagatttatacagacatagagatgaaccgacttggaaagtaactcaaatcctgctaggtatgaaaaaaactaacagatatcacgcctaggactagtgtgaaatagacatcagaattaagaaaaacgtagggtccaagtggttccccgttatggactcgctatctgtcaaccagatcttataccctgaagttcacctagatagcccgatagttaccaataagatagtagccatcctggagtatgctcgactgtttaaacctgcaggcatgcaagctgatctttttccctctgccaaaaattatggggacatcatgaagccccttgagcatctgacttctggctaataaaggaaatttattttcattgcaatagtgtgttggaattttttgtgtctctcactcggaaggacatatgggagggcaaatcatttaaaacatcagaatgagtatttggtttagagtttggcaacatatgcccatatgctggctgccatgaacaaaggttggctataaagaggtcatcagtatatgaaacagccccctgctgtccattccttattccatagaaaagccttgacttgaggttagattttttttatattttgttttgtgttatttttttctttaacatccctaaaattttccttacatgttttactagccagatttttcctcctctcctgactactcccagtcatagctgtccctcttctcttatggagatccctcgaggagctttttgcaaaagcctaggcctccaaaaaagcctcttcactacttctggaatagctcagaagccgaggcggcctcggcctctgcataaataaaaaaaattagtcagccatggggcggagaatgggcggaactgggcggagttaggggcgggatgggcggagttaggggcgggactatggttgctgactaattgctgcattaatgaatcggccaacgcgcggggagaggcggtttgcgtattgggcgctcttccgcttcctcgctcactgactcgctgcgctcggtcgttcggctgcggcgagcggtatcagctcactcaaaggcggtaatacggttatccacagaatcaggggataacgcaggaaagaacatgtgagcaaaaggccagcaaaaggccaggaaccgtaaaaaggccgcgttgctggcgtttttccataggctccgcccccctgacgagcatcacaaaaatcgacgctcaagtcagaggtggcgaaacccgacaggactataaagataccaggcgtttccccctggaagctccctcgtgcgctctcctgttccgaccctgccgcttaccggatacctgtccgcctttctcccttcgggaagcgtggcgctttctcatagctcacgctgtaggtatctcagttcggtgtaggtcgttcgctccaagctgggctgtgtgcacgaaccccccgttcagcccgaccgctgcgccttatccggtaactatcgtcttgagtccaacccggtaagacacgacttatcgccactggcagcagccactggtaacaggattagcagagcgaggtatgtaggcggtgctacagagttcttgaagtggtggcctaactacggctacactagaagaacagtatttggtatctgcgctctgctgaagccagttaccttcggaaaaagagttggtagctcttgatccggcaaacaaaccaccgctggtagcggtggtttttttgtttgcaagcagcagattacgcgcagaaaaaaaggatctcaagaagatcctttgatcttttctacggggtctgacgctcagtggaacgaaaactcacgttaagggattttggtcatgagattatcaaaaaggatcttcacctagatccttttaaattaaaaatgaagttttaaatcaatctaaagtatatatgagtaaacttggtctgacagttaccaatgcttaatcagtgaggcacctatctcagcgatctgtctatttcgttcatccatagttgcctgactccccgtcgtgtagataactacgatacgggagggcttaccatctggccccagtgctgcaatgataccgcgagacccacgctcaccggctccagatttatcagcaataaaccagccagccggaagggccgagcgcagaagtggtcctgcaactttatccgcctccatccagtctattaattgttgccgggaagctagagtaagtagttcgccagttaatagtttgcgcaacgttgttgccattgctacaggcatcgtggtgtcacgctcgtcgtttggtatggcttcattcagctccggttcccaacgatcaaggcgagttacatgatcccccatgttgtgcaaaaaagcggttagctccttcggtcctccgatcgttgtcagaagtaagttggccgcagtgttatcactcatggttatggcagcactgcataattctcttactgtcatgccatccgtaagatgcttttctgtgactggtgagtactcaaccaagtcattctgagaatagtgtatgcggcgaccgagttgctcttgcccggcgtcaatacgggataataccgcgccacatagcagaactttaaaagtgctcatcattggaaaacgttcttcggggcgaaaactctcaaggatcttaccgctgttgagatccagttcgatgtaacccactcgtgcacccaactgatcttcagcatcttttactttcaccagcgtttctgggtgagcaaaaacaggaaggcaaaatgccgcaaaaaagggaataagggcgacacggaaatgttgaatactcatactcttcctttttcaatattattgaagcatttatcagggttattgtctcatgagcggatacatatttgaatgtatttagaaaaataaacaaataggggttccgcgcacatttccccgaaaagtgccacctgacgtctaagaaaccattattatcatgacattaacctataaaaataggcgtatcacgaggccctttcgtctcgcgcgtttcggtgatgacggtgaaaacctctgacacatgcagctcccggagacggtcacagcttgtctgtaagcggatgccgggagcagacaagcccgtcagggcgcgtcagcgggtgttggcgggtgtcggggctggcttaactatgcggcatcagagcagattgtactgagagtgcaccattcgacgctctcccttatgcgactcctgcattaggaagcagcccagtagtaggttgaggccgttgagcaccgccgccgcaaggaatggtctggcttatcgaaattaatacgactcactatagggagacc

SEQ ID NO: 94 - DNA, 6188 bp, synthetic construct
  source 1..6188: mol_type = other DNA
ggaattcgagctcgccccgttacataacttacggtaaatggcccgcctggctgaccgcccaacgacccccgcccattgacgtcaataatgacgtatgttcccatagtaacgccaatagggactttccattgacgtcaatgggtggagtatttacggtaaactgcccacttggcagtacatcaagtgtatcatatgccaagtacgccccctattgacgtcaatgacggtaaatggcccgcctggcattatgcccagtacatgaccttatgggactttcctacttggcagtacatctacgtattagtcatcgctattaccatggtgatgcggttttggcagtacatcaatgggcgtggatagcggtttgactcacggggatttccaagtctccaccccattgacgtcaatgggagtttgttttggcaccaaaatcaacgggactttccaaaatgtcgtaacaactccgccccattgacgcaaatgggcggtaggcgtgtacggtgggaggtctatataagcagagctcgtttagtgaaccgtcagatcgcctggagacgccatccacgctgttttgacctccatagaagacaccgggaccgatccagcctccgggggatcgatccccccgatcctgagaacttcagggtgagtttggggacccttgattgttctttctttttcgctattgtaaaattcatgttatatggagggggcaaagttttcagggtgttgtttagaatgggaagatgtcccttgtatcaccatggaccctcatgataattttgtttctttcactttctactctgttgacaaccattgtctcctcttattttcttttcattttctgtaactttttcgttaaactttagcttgcatttgtaacgaatttttaaattcacttttgtttatttgtcagattgtaagtactttctctaatcacttttttttcaaggcaatcagggtatattatattgtacttcagcacagttttagagaacaattgttataattaaatgataaggtagaatatttctgcatataaattctggctggcgtggaaatattcttattggtagaaacaactacatcctggtcatcatcctgcctttctctttatggttacaatgatatacactgtttgagatgaggataaaatactctgagtccaaaccgggcccctctgctaaccatgttcatgccttcttctttttcctacagctcctgggcaacgtgctggttattgtgctgtctcatcattttggcaaagaattgtaatacgactcactatagggcgaattcggatcccccggtagttaattaatacgcgtcactatgaagtgccttttgtacttagcctttttattcattggggtgaattgccggggagtaccgcacatcgtgatggtggatgcctataaacggtacaagggcagcggcggctccggaaagttcacgatcgtttttccacacaaccaaaaaggaaactggaaaaatgttccttctaattaccattattgcccgtcaagctcagatttaaattggcataatgacttaataggcacagccttacaagtcaaaatgccccagagtcacaaggctattcaagcagacggttggatgtgtcatgcttccaaatgggtcactacttgtgatttccgctggtatggaccgaagtatataacacattccatccgatccttcactccatctgtagaacaatgcaaggaaagcattgaacaaacgaaacaaggaacttggctgaatccaggcttccctcctcaaagttgtggatatgcaactgtgacggatgccgaagcagtgattgtccaggtgactcctcaccatgtgctggttgatgaatacacaggagaatgggttgattcacagttcatcaacggaaaatgcagcaattacatatgccccactgtccataactctacaacctggcattctgactataaggtcaaagggctatgtgattctaacctcatttccatggacatcaccttcttctcagaggacggagagctatcatccctgggaaaggagggcacagggttcagaagtaaccaatttgcttatgaaactggaggcaaggcctgcaaaatgcaatactgcaagcattggggagtcagactcccatcaggtgtctggttcgagatggctgataaggatctctttgctgcagccagattccctgaatgcccagaagggtcaagtatctctgctccatctcagacctcagtggatgtaagtctaattcaggacgttgagaggatcttggattattccctctgccaagaaacctggagcaaaatcagagcgggtcttccaatctctccagtggatctcagctatcttgctcctaaaaacccaggaaccggtcctgctttcaccataatcaatggtaccctaaaatactttgagaccagatacatcagagtcgatattgctgctccaatcctctcaagaatggtcggaatgatctccggaactaccacagaacaggaactgtgggatgactgggcgccatatgaagacgtggaaattggacccaatggagttctgaggaccagttcaggatataagtttcctttatacatgattggacatggtatgttggactccgatcttcatcttagctcaaaggctcaggtgttcgaacatcctcacattcaagacgctgcttcgcaacttcctgatgatgagagtttattttttggtgatactgggctatccaaaaatccaatcgagcttgtagaaggttggttcagtagttggaaaagctctattgcctcttttttctttatcatagggttaatcattggactattcttggttctccgagttggtatccatctttgcattaaattaaagcacaccaagaaaagacagatttatacagacatagagatgaaccgacttggaaagtaactcaaatcctgctaggtatgaaaaaaactaacagatatcacgcctaggactagtgtgaaatagacatcagaattaagaaaaacgtagggtccaagtggttccccgttatggactcgctatctgtcaaccagatcttataccctgaagttcacctagatagcccgatagttaccaataagatagtagccatcctggagtatgctcgactgtttaaacctgcaggcatgcaagctgatctttttccctctgccaaaaattatggggacatcatgaagccccttgagcatctgacttctggctaataaaggaaatttattttcattgcaatagtgtgttggaattttttgtgtctctcactcggaaggacatatgggagggcaaatcatttaaaacatcagaatgagtatttggtttagagtttggcaacatatgcccatatgctggctgccatgaacaaaggttggctataaagaggtcatcagtatatgaaacagccccctgctgtccattccttattccatagaaaagccttgacttgaggttagattttttttatattttgttttgtgttatttttttctttaacatccctaaaattttccttacatgttttactagccagatttttcctcctctcctgactactcccagtcatagctgtccctcttctcttatggagatccctcgaggagctttttgcaaaagcctaggcctccaaaaaagcctcttcactacttctggaatagctcagaagccgaggcggcctcggcctctgcataaataaaaaaaattagtcagccatggggcggagaatgggcggaactgggcggagttaggggcgggatgggcggagttaggggcgggactatggttgctgactaattgctgcattaatgaatcggccaacgcgcggggagaggcggtttgcgtattgggcgctcttccgcttcctcgctcactgactcgctgcgctcggtcgttcggctgcggcgagcggtatcagctcactcaaaggcggtaatacggttatccacagaatcaggggataacgcaggaaagaacatgtgagcaaaaggccagcaaaaggccaggaaccgtaaaaaggccgcgttgctggcgtttttccataggctccgcccccctgacgagcatcacaaaaatcgacgctcaagtcagaggtggcgaaacccgacaggactataaagataccaggcgtttccccctggaagctccctcgtgcgctctcctgttccgaccctgccgcttaccggatacctgtccgcctttctcccttcgggaagcgtggcgctttctcatagctcacgctgtaggtatctcagttcggtgtaggtcgttcgctccaagctgggctgtgtgcacgaaccccccgttcagcccgaccgctgcgccttatccggtaactatcgtcttgagtccaacccggtaagacacgacttatcgccactggcagcagccactggtaacaggattagcagagcgaggtatgtaggcggtgctacagagttcttgaagtggtggcctaactacggctacactagaagaacagtatttggtatctgcgctctgctgaagccagttaccttcggaaaaagagttggtagctcttgatccggcaaacaaaccaccgctggtagcggtggtttttttgtttgcaagcagcagattacgcgcagaaaaaaaggatctcaagaagatcctttgatcttttctacggggtctgacgctcagtggaacgaaaactcacgttaagggattttggtcatgagattatcaaaaaggatcttcacctagatccttttaaattaaaaatgaagttttaaatcaatctaaagtatatatgagtaaacttggtctgacagttaccaatgcttaatcagtgaggcacctatctcagcgatctgtctatttcgttcatccatagttgcctgactccccgtcgtgtagataactacgatacgggagggcttaccatctggccccagtgctgcaatgataccgcgagacccacgctcaccggctccagatttatcagcaataaaccagccagccggaagggccgagcgcagaagtggtcctgcaactttatccgcctccatccagtctattaattgttgccgggaagctagagtaagtagttcgccagttaatagtttgcgcaacgttgttgccattgctacaggcatcgtggtgtcacgctcgtcgtttggtatggcttcattcagctccggttcccaacgatcaaggcgagttacatgatcccccatgttgtgcaaaaaagcggttagctccttcggtcctccgatcgttgtcagaagtaagttggccgcagtgttatcactcatggttatggcagcactgcataattctcttactgtcatgccatccgtaagatgcttttctgtgactggtgagtactcaaccaagtcattctgagaatagtgtatgcggcgaccgagttgctcttgcccggcgtcaatacgggataataccgcgccacatagcagaactttaaaagtgctcatcattggaaaacgttcttcggggcgaaaactctcaaggatcttaccgctgttgagatccagttcgatgtaacccactcgtgcacccaactgatcttcagcatcttttactttcaccagcgtttctgggtgagcaaaaacaggaaggcaaaatgccgcaaaaaagggaataagggcgacacggaaatgttgaatactcatactcttcctttttcaatattattgaagcatttatcagggttattgtctcatgagcggatacatatttgaatgtatttagaaaaataaacaaataggggttccgcgcacatttccccgaaaagtgccacctgacgtctaagaaaccattattatcatgacattaacctataaaaataggcgtatcacgaggccctttcgtctcgcgcgtttcggtgatgacggtgaaaacctctgacacatgcagctcccggagacggtcacagcttgtctgtaagcggatgccgggagcagacaagcccgtcagggcgcgtcagcgggtgttggcgggtgtcggggctggcttaactatgcggcatcagagcagattgtactgagagtgcaccattcgacgctctcccttatgcgactcctgcattaggaagcagcccagtagtaggttgaggccgttgagcaccgccgccgcaaggaatggtctggcttatcgaaattaatacgactcactatagggagacc

SEQ ID NO: 95 - DNA, 6185 bp, synthetic construct
  source 1..6185: mol_type = other DNA
ggaattcgagctcgccccgttacataacttacggtaaatggcccgcctggctgaccgcccaacgacccccgcccattgacgtcaataatgacgtatgttcccatagtaacgccaatagggactttccattgacgtcaatgggtggagtatttacggtaaactgcccacttggcagtacatcaagtgtatcatatgccaagtacgccccctattgacgtcaatgacggtaaatggcccgcctggcattatgcccagtacatgaccttatgggactttcctacttggcagtacatctacgtattagtcatcgctattaccatggtgatgcggttttggcagtacatcaatgggcgtggatagcggtttgactcacggggatttccaagtctccaccccattgacgtcaatgggagtttgttttggcaccaaaatcaacgggactttccaaaatgtcgtaacaactccgccccattgacgcaaatgggcggtaggcgtgtacggtgggaggtctatataagcagagctcgtttagtgaaccgtcagatcgcctggagacgccatccacgctgttttgacctccatagaagacaccgggaccgatccagcctccgggggatcgatccccccgatcctgagaacttcagggtgagtttggggacccttgattgttctttctttttcgctattgtaaaattcatgttatatggagggggcaaagttttcagggtgttgtttagaatgggaagatgtcccttgtatcaccatggaccctcatgataattttgtttctttcactttctactctgttgacaaccattgtctcctcttattttcttttcattttctgtaactttttcgttaaactttagcttgcatttgtaacgaatttttaaattcacttttgtttatttgtcagattgtaagtactttctctaatcacttttttttcaaggcaatcagggtatattatattgtacttcagcacagttttagagaacaattgttataattaaatgataaggtagaatatttctgcatataaattctggctggcgtggaaatattcttattggtagaaacaactacatcctggtcatcatcctgcctttctctttatggttacaatgatatacactgtttgagatgaggataaaatactctgagtccaaaccgggcccctctgctaaccatgttcatgccttcttctttttcctacagctcctgggcaacgtgctggttattgtgctgtctcatcattttggcaaagaattgtaatacgactcactatagggcgaattcggatcccccggtagttaattaatacgcgtcactatgaagtgccttttgtacttagcctttttattcattggggtgaattgccggggagtaccgcacatcgtgatggtggatgcctataaacggtacaagggcagcggcggctccggaaagttcacgatcgtttttccacacaaccaaaaaggaaactggaaaaatgttccttctaattaccattattgcccgtcaagctcagatttaaattggcataatgacttaataggcacagccttacaagtcaaaatgcccagtcacaaggctattcaagcagacggttggatgtgtcatgcttccaaatgggtcactacttgtgatttccgctggtatggaccgaagtatataacacattccatccgatccttcactccatctgtagaacaatgcaaggaaagcattgaacaaacgaaacaaggaacttggctgaatccaggcttccctcctcaaagttgtggatatgcaactgtgacggatgccgaagcagtgattgtccaggtgactcctcaccatgtgctggttgatgaatacacaggagaatgggttgattcacagttcatcaacggaaaatgcagcaattacatatgccccactgtccataactctacaacctggcattctgactataaggtcaaagggctatgtgattctaacctcatttccatggacatcaccttcttctcagaggacggagagctatcatccctgggaaaggagggcacagggttcagaagtaactactttgcttatgaaactggaggcaaggcctgcaaaatgcaatactgcaagcattggggagtcagactcccatcaggtgtctggttcgagatggctgataaggatctctttgctgcagccagattccctgaatgcccagaagggtcaagtatctctgctccatctcagacctcagtggatgtaagtctaattcaggacgttgagaggatcttggattattccctctgccaagaaacctggagcaaaatcagagcgggtcttccaatctctccagtggatctcagctatcttgctcctaaaaacccaggaaccggtcctgctttcaccataatcaatggtaccctaaaatactttgagaccagatacatcagagtcgatattgctgctccaatcctctcaagaatggtcggaatgatcagtggaactaccacagaaagggaactgtgggatgactgggcaccatatgaagacgtggaaattggacccaatggagttctgaggaccagttcaggatataagtttcctttatacatgattggacatggtatgttggactccgatcttcatcttagctcaaaggctcaggtgttcgaacatcctcacattcaagacgctgcttcgcaacttcctgatgatgagagtttattttttggtgatactgggctatccaaaaatccaatcgagcttgtagaaggttggttcagtagttggaaaagctctattgcctcttttttctttatcatagggttaatcattggactattcttggttctccgagttggtatccatctttgcattaaattaaagcacaccaagaaaagacagatttatacagacatagagatgaaccgacttggaaagtaactcaaatcctgctaggtatgaaaaaaactaacagatatcacgcctaggactagtgtgaaatagacatcagaattaagaaaaacgtagggtccaagtggttccccgttatggactcgctatctgtcaaccagatcttataccctgaagttcacctagatagcccgatagttaccaataagatagtagccatcctggagtatgctcgactgtttaaacctgcaggcatgcaagctgatctttttccctctgccaaaaattatggggacatcatgaagccccttgagcatctgacttctggctaataaaggaaatttattttcattgcaatagtgtgttggaattttttgtgtctctcactcggaaggacatatgggagggcaaatcatttaaaacatcagaatgagtatttggtttagagtttggcaacatatgcccatatgctggctgccatgaacaaaggttggctataaagaggtcatcagtatatgaaacagccccctgctgtccattccttattccatagaaaagccttgacttgaggttagattttttttatattttgttttgtgttatttttttctttaacatccctaaaattttccttacatgttttactagccagatttttcctcctctcctgactactcccagtcatagctgtccctcttctcttatggagatccctcgaggagctttttgcaaaagcctaggcctccaaaaaagcctcttcactacttctggaatagctcagaagccgaggcggcctcggcctctgcataaataaaaaaaattagtcagccatggggcggagaatgggcggaactgggcggagttaggggcgggatgggcggagttaggggcgggactatggttgctgactaattgctgcattaatgaatcggccaacgcgcggggagaggcggtttgcgtattgggcgctcttccgcttcctcgctcactgactcgctgcgctcggtcgttcggctgcggcgagcggtatcagctcactcaaaggcggtaatacggttatccacagaatcaggggataacgcaggaaagaacatgtgagcaaaaggccagcaaaaggccaggaaccgtaaaaaggccgcgttgctggcgtttttccataggctccgcccccctgacgagcatcacaaaaatcgacgctcaagtcagaggtggcgaaacccgacaggactataaagataccaggcgtttccccctggaagctccctcgtgcgctctcctgttccgaccctgccgcttaccggatacctgtccgcctttctcccttcgggaagcgtggcgctttctcatagctcacgctgtaggtatctcagttcggtgtaggtcgttcgctccaagctgggctgtgtgcacgaaccccccgttcagcccgaccgctgcgccttatccggtaactatcgtcttgagtccaacccggtaagacacgacttatcgccactggcagcagccactggtaacaggattagcagagcgaggtatgtaggcggtgctacagagttcttgaagtggtggcctaactacggctacactagaagaacagtatttggtatctgcgctctgctgaagccagttaccttcggaaaaagagttggtagctcttgatccggcaaacaaaccaccgctggtagcggtggtttttttgtttgcaagcagcagattacgcgcagaaaaaaaggatctcaagaagatcctttgatcttttctacggggtctgacgctcagtggaacgaaaactcacgttaagggattttggtcatgagattatcaaaaaggatcttcacctagatccttttaaattaaaaatgaagttttaaatcaatctaaagtatatatgagtaaacttggtctgacagttaccaatgcttaatcagtgaggcacctatctcagcgatctgtctatttcgttcatccatagttgcctgactccccgtcgtgtagataactacgatacgggagggcttaccatctggccccagtgctgcaatgataccgcgagacccacgctcaccggctccagatttatcagcaataaaccagccagccggaagggccgagcgcagaagtggtcctgcaactttatccgcctccatccagtctattaattgttgccgggaagctagagtaagtagttcgccagttaatagtttgcgcaacgttgttgccattgctacaggcatcgtggtgtcacgctcgtcgtttggtatggcttcattcagctccggttcccaacgatcaaggcgagttacatgatcccccatgttgtgcaaaaaagcggttagctccttcggtcctccgatcgttgtcagaagtaagttggccgcagtgttatcactcatggttatggcagcactgcataattctcttactgtcatgccatccgtaagatgcttttctgtgactggtgagtactcaaccaagtcattctgagaatagtgtatgcggcgaccgagttgctcttgcccggcgtcaatacgggataataccgcgccacatagcagaactttaaaagtgctcatcattggaaaacgttcttcggggcgaaaactctcaaggatcttaccgctgttgagatccagttcgatgtaacccactcgtgcacccaactgatcttcagcatcttttactttcaccagcgtttctgggtgagcaaaaacaggaaggcaaaatgccgcaaaaaagggaataagggcgacacggaaatgttgaatactcatactcttcctttttcaatattattgaagcatttatcagggttattgtctcatgagcggatacatatttgaatgtatttagaaaaataaacaaataggggttccgcgcacatttccccgaaaagtgccacctgacgtctaagaaaccattattatcatgacattaacctataaaaataggcgtatcacgaggccctttcgtctcgcgcgtttcggtgatgacggtgaaaacctctgacacatgcagctcccggagacggtcacagcttgtctgtaagcggatgccgggagcagacaagcccgtcagggcgcgtcagcgggtgttggcgggtgtcggggctggcttaactatgcggcatcagagcagattgtactgagagtgcaccattcgacgctctcccttatgcgactcctgcattaggaagcagcccagtagtaggttgaggccgttgagcaccgccgccgcaaggaatggtctggcttatcgaaattaatacgactcactatagggagacc

SEQ ID NO: 96 - DNA, 6122 bp, synthetic construct
  source 1..6122: mol_type = other DNA
ggaattcgagctcgccccgttacataacttacggtaaatggcccgcctggctgaccgcccaacgacccccgcccattgacgtcaataatgacgtatgttcccatagtaacgccaatagggactttccattgacgtcaatgggtggagtatttacggtaaactgcccacttggcagtacatcaagtgtatcatatgccaagtacgccccctattgacgtcaatgacggtaaatggcccgcctggcattatgcccagtacatgaccttatgggactttcctacttggcagtacatctacgtattagtcatcgctattaccatggtgatgcggttttggcagtacatcaatgggcgtggatagcggtttgactcacggggatttccaagtctccaccccattgacgtcaatgggagtttgttttggcaccaaaatcaacgggactttccaaaatgtcgtaacaactccgccccattgacgcaaatgggcggtaggcgtgtacggtgggaggtctatataagcagagctcgtttagtgaaccgtcagatcgcctggagacgccatccacgctgttttgacctccatagaagacaccgggaccgatccagcctccgggggatcgatccccccgatcctgagaacttcagggtgagtttggggacccttgattgttctttctttttcgctattgtaaaattcatgttatatggagggggcaaagttttcagggtgttgtttagaatgggaagatgtcccttgtatcaccatggaccctcatgataattttgtttctttcactttctactctgttgacaaccattgtctcctcttattttcttttcattttctgtaactttttcgttaaactttagcttgcatttgtaacgaatttttaaattcacttttgtttatttgtcagattgtaagtactttctctaatcacttttttttcaaggcaatcagggtatattatattgtacttcagcacagttttagagaacaattgttataattaaatgataaggtagaatatttctgcatataaattctggctggcgtggaaatattcttattggtagaaacaactacatcctggtcatcatcctgcctttctctttatggttacaatgatatacactgtttgagatgaggataaaatactctgagtccaaaccgggcccctctgctaaccatgttcatgccttcttctttttcctacagctcctgggcaacgtgctggttattgtgctgtctcatcattttggcaaagaattgtaatacgactcactatagggcgaattcggatcccccggtagttaattaatacgcgtcactatgaagtgccttttgtacttagcctttttattcattggggtgaattgcaagttcaccatagtttttccacacaaccaaaaaggaaactggaaaaatgttccttctaattaccattattgcccgtcaagctcagatttaaattggcataatgacttaataggcacagccttacaagtcaaaatgcccaagagtcacaaggctattcaagcagacggttggatgtgtcatgcttccaaatgggtcactacttgtgatttccgctggtatggaccgaagtatataacacattccatccgatccttcactccatctgtagaacaatgcaaggaaagcattgaacaaacgaaacaaggaacttggctgaatccaggcttccctcctcaaagttgtggatatgcaactgtgacggatgccgaagcagtgattgtccaggtgactcctcaccatgtgctggttgatgaatacacaggagaatgggttgattcacagttcatcaacggaaaatgcagcaattacatatgccccactgtccataactctacaacctggcattctgactataaggtcaaagggctatgtgattctaacctcatttccatggacatcaccttcttctcagaggacggagagctatcatccctgggaaaggagggcacagggttcagaagtaactactttgcttatgaaactggaggcaaggcctgcaaaatgcaatactgcaagcattggggagtcagactcccatcaggtgtctggttcgagatggctgataaggatctctttgctgcagccagattccctgaatgcccagaagggtcaagtatctctgctccatctcagacctcagtggatgtaagtctaattcaggacgttgagaggatcttggattattccctctgccaagaaacctggagcaaaatcagagcgggtcttccaatctctccagtggatctcagctatcttgctcctaaaaacccaggaaccggtcctgctttcaccataatcaatggtaccctaaaatactttgagaccagatacatcagagtcgatattgctgctccaatcctctcaagaatggtcggaatgatcagtggaactaccacagaaagggaactgtgggatgactgggcaccatatgaagacgtggaaattggacccaatggagttctgaggaccagttcaggatataagtttcctttatacatgattggacatggtatgttggactccgatcttcatcttagctcaaaggctcaggtgttcgaacatcctcacattcaagacgctgcttcgcaacttcctgatgatgagagtttattttttggtgatactgggctatccaaaaatccaatcgagcttgtagaaggttggttcagtagttggaaaagctctattgcctcttttttctttatcatagggttaatcattggactattcttggttctccgagttggtatccatctttgcattaaattaaagcacaccaagaaaagacagatttatacagacatagagatgaaccgacttggaaagtaactcaaatcctgctaggtatgaaaaaaactaacagatatcacgcctaggactagtgtgaaatagacatcagaattaagaaaaacgtagggtccaagtggttccccgttatggactcgctatctgtcaaccagatcttataccctgaagttcacctagatagcccgatagttaccaataagatagtagccatcctggagtatgctcgactgtttaaacctgcaggcatgcaagctgatctttttccctctgccaaaaattatggggacatcatgaagccccttgagcatctgacttctggctaataaaggaaatttattttcattgcaatagtgtgttggaattttttgtgtctctcactcggaaggacatatgggagggcaaatcatttaaaacatcagaatgagtatttggtttagagtttggcaacatatgcccatatgctggctgccatgaacaaaggttggctataaagaggtcatcagtatatgaaacagccccctgctgtccattccttattccatagaaaagccttgacttgaggttagattttttttatattttgttttgtgttatttttttctttaacatccctaaaattttccttacatgttttactagccagatttttcctcctctcctgactactcccagtcatagctgtccctcttctcttatggagatccctcgaggagctttttgcaaaagcccaggcctccaaaaaagcctcttcactacttctggaatagctcagaagccgaggcggcctcggcctctgcataaataaaaaaaattagtcagccatggggcggagaatgggcggaactgggcggagttaggggcgggatgggcggagttaggggcgggactatggttgctgactaattgctgcattaatgaatcggccaacgcgcggggagaggcggtttgcgtattgggcgctcttccgcttcctcgctcactgactcgctgcgctcggtcgttcggctgcggcgagcggtatcagctcactcaaaggcggtaatacggttatccacagaatcaggggataacgcaggaaagaacatgtgagcaaaaggccagcaaaaggccaggaaccgtaaaaaggccgcgttgctggcgtttttccataggctccgcccccctgacgagcatcacaaaaatcgacgctcaagtcagaggtggcgaaacccgacaggactataaagataccaggcgtttccccctggaagctccctcgtgcgctctcctgttccgaccctgccgcttaccggatacctgtccgcctttctcccttcgggaagcgtggcgctttctcatagctcacgctgtaggtatctcagttcggtgtaggtcgttcgctccaagctgggctgtgtgcacgaaccccccgttcagcccgaccgctgcgccttatccggtaactatcgtcttgagtccaacccggtaagacacgacttatcgccactggcagcagccactggtaacaggattagcagagcgaggtatgtaggcggtgctacagagttcttgaagtggtggcctaactacggctacactagaagaacagtatttggtatctgcgctctgctgaagccagttaccttcggaaaaagagttggtagctcttgatccggcaaacaaaccaccgctggtagcggtggtttttttgtttgcaagcagcagattacgcgcagaaaaaaaggatctcaagaagatcctttgatcttttctacggggtctgacgctcagtggaacgaaaactcacgttaagggattttggtcatgagattatcaaaaaggatcttcacctagatccttttaaattaaaaatgaagttttaaatcaatctaaagtatatatgagtaaacttggtctgacagttaccaatgcttaatcagtgaggcacctatctcagcgatctgtctatttcgttcatccatagttgcctgactccccgtcgtgtagataactacgatacgggagggcttaccatctggccccagtgctgcaatgataccgcgagacccacgctcaccggctccagatttatcagcaataaaccagccagccggaagggccgagcgcagaagtggtcctgcaactttatccgcctccatccagtctattaattgttgccgggaagctagagtaagtagttcgccagttaatagtttgcgcaacgttgttgccattgctacaggcatcgtggtgtcacgctcgtcgtttggtatggcttcattcagctccggttcccaacgatcaaggcgagttacatgatcccccatgttgtgcaaaaaagcggttagctccttcggtcctccgatcgttgtcagaagtaagttggccgcagtgttatcactcatggttatggcagcactgcataattctcttactgtcatgccatccgtaagatgcttttctgtgactggtgagtactcaaccaagtcattctgagaatagtgtatgcggcgaccgagttgctcttgcccggcgtcaatacgggataataccgcgccacatagcagaactttaaaagtgctcatcattggaaaacgttcttcggggcgaaaactctcaaggatcttaccgctgttgagatccagttcgatgtaacccactcgtgcacccaactgatcttcagcatcttttactttcaccagcgtttctgggtgagcaaaaacaggaaggcaaaatgccgcaaaaaagggaataagggcgacacggaaatgttgaatactcatactcttcctttttcaatattattgaagcatttatcagggttattgtctcatgagcggatacatatttgaatgtatttagaaaaataaacaaataggggttccgcgcacatttccccgaaaagtgccacctgacgtctaagaaaccattattatcatgacattaacctataaaaataggcgtatcacgaggccctttcgtctcgcgcgtttcggtgatgacggtgaaaacctctgacacatgcagctcccggagacggtcacagcttgtctgtaagcggatgccgggagcagacaagcccgtcagggcgcgtcagcgggtgttggcgggtgtcggggctggcttaactatgcggcatcagagcagattgtactgagagtgcaccattcgacgctctcccttatgcgactcctgcattaggaagcagcccagtagtaggttgaggccgttgagcaccgccgccgcaaggaatggtctggcttatcgaaattaatacgactcactatagggagacc

SEQ ID NO: 97 - DNA, 6122 bp, synthetic construct
  source 1..6122: mol_type = other DNA
ggaattcgagctcgccccgttacataacttacggtaaatggcccgcctggctgaccgcccaacgacccccgcccattgacgtcaataatgacgtatgttcccatagtaacgccaatagggactttccattgacgtcaatgggtggagtatttacggtaaactgcccacttggcagtacatcaagtgtatcatatgccaagtacgccccctattgacgtcaatgacggtaaatggcccgcctggcattatgcccagtacatgaccttatgggactttcctacttggcagtacatctacgtattagtcatcgctattaccatggtgatgcggttttggcagtacatcaatgggcgtggatagcggtttgactcacggggatttccaagtctccaccccattgacgtcaatgggagtttgttttggcaccaaaatcaacgggactttccaaaatgtcgtaacaactccgccccattgacgcaaatgggcggtaggcgtgtacggtgggaggtctatataagcagagctcgtttagtgaaccgtcagatcgcctggagacgccatccacgctgttttgacctccatagaagacaccgggaccgatccagcctccgggggatcgatccccccgatcctgagaacttcagggtgagtttggggacccttgattgttctttctttttcgctattgtaaaattcatgttatatggagggggcaaagttttcagggtgttgtttagaatgggaagatgtcccttgtatcaccatggaccctcatgataattttgtttctttcactttctactctgttgacaaccattgtctcctcttattttcttttcattttctgtaactttttcgttaaactttagcttgcatttgtaacgaatttttaaattcacttttgtttatttgtcagattgtaagtactttctctaatcacttttttttcaaggcaatcagggtatattatattgtacttcagcacagttttagagaacaattgttataattaaatgataaggtagaatatttctgcatataaattctggctggcgtggaaatattcttattggtagaaacaactacatcctggtcatcatcctgcctttctctttatggttacaatgatatacactgtttgagatgaggataaaatactctgagtccaaaccgggcccctctgctaaccatgttcatgccttcttctttttcctacagctcctgggcaacgtgctggttattgtgctgtctcatcattttggcaaagaattgtaatacgactcactatagggcgaattcggatcccccggtagttaattaatacgcgtcactatgaagtgccttttgtacttagcctttttattcattggggtgaattgcaagttcaccatagtttttccacacaaccaaaaaggaaactggaaaaatgttccttctaattaccattattgcccgtcaagctcagatttaaattggcataatgacttaataggcacagccttacaagtcaaaatgccccagagtcacaaggctattcaagcagacggttggatgtgtcatgcttccaaatgggtcactacttgtgatttccgctggtatggaccgaagtatataacacattccatccgatccttcactccatctgtagaacaatgcaaggaaagcattgaacaaacgaaacaaggaacttggctgaatccaggcttccctcctcaaagttgtggatatgcaactgtgacggatgccgaagcagtgattgtccaggtgactcctcaccatgtgctggttgatgaatacacaggagaatgggttgattcacagttcatcaacggaaaatgcagcaattacatatgccccactgtccataactctacaacctggcattctgactataaggtcaaagggctatgtgattctaacctcatttccatggacatcaccttcttctcagaggacggagagctatcatccctgggaaaggagggcacagggttcagaagtaactactttgcttatgaaactggaggcaaggcctgcaaaatgcaatactgcaagcattggggagtcagactcccatcaggtgtctggttcgagatggctgataaggatctctttgctgcagccagattccctgaatgcccagaagggtcaagtatctctgctccatctcagacctcagtggatgtaagtctaattcaggacgttgagaggatcttggattattccctctgccaagaaacctggagcaaaatcagagcgggtcttccaatctctccagtggatctcagctatcttgctcctaaaaacccaggaaccggtcctgctttcaccataatcaatggtaccctaaaatactttgagaccagatacatcagagtcgatattgctgctccaatcctctcaagaatggtcggaatgatcagtggaactaccacagaacaggaactgtgggatgactgggcaccatatgaagacgtggaaattggacccaatggagttctgaggaccagttcaggatataagtttcctttatacatgattggacatggtatgttggactccgatcttcatcttagctcaaaggctcaggtgttcgaacatcctcacattcaagacgctgcttcgcaacttcctgatgatgagagtttattttttggtgatactgggctatccaaaaatccaatcgagcttgtagaaggttggttcagtagttggaaaagctctattgcctcttttttctttatcatagggttaatcattggactattcttggttctccgagttggtatccatctttgcattaaattaaagcacaccaagaaaagacagatttatacagacatagagatgaaccgacttggaaagtaactcaaatcctgctaggtatgaaaaaaactaacagatatcacgcctaggactagtgtgaaatagacatcagaattaagaaaaacgtagggtccaagtggttccccgttatggactcgctatctgtcaaccagatcttataccctgaagttcacctagatagcccgatagttaccaataagatagtagccatcctggagtatgctcgactgtttaaacctgcaggcatgcaagctgatctttttccctctgccaaaaattatggggacatcatgaagccccttgagcatctgacttctggctaataaaggaaatttattttcattgcaatagtgtgttggaattttttgtgtctctcactcggaaggacatatgggagggcaaatcatttaaaacatcagaatgagtatttggtttagagtttggcaacatatgcccatatgctggctgccatgaacaaaggttggctataaagaggtcatcagtatatgaaacagccccctgctgtccattccttattccatagaaaagccttgacttgaggttagattttttttatattttgttttgtgttatttttttctttaacatccctaaaattttccttacatgttttactagccagatttttcctcctctcctgactactcccagtcatagctgtccctcttctcttatggagatccctcgaggagctttttgcaaaagcctaggcctccaaaaaagcctcttcactacttctggaatagctcagaagccgaggcggcctcggcctctgcataaataaaaaaaattagtcagccatggggcggagaatgggcggaactgggcggagttaggggcgggatgggcggagttaggggcgggactatggttgctgactaattgctgcattaatgaatcggccaacgcgcggggagaggcggtttgcgtattgggcgctcttccgcttcctcgctcactgactcgctgcgctcggtcgttcggctgcggcgagcggtatcagctcactcaaaggcggtaatacggttatccacagaatcaggggataacgcaggaaagaacatgtgagcaaaaggccagcaaaaggccaggaaccgtaaaaaggccgcgttgctggcgtttttccataggctccgcccccctgacgagcatcacaaaaatcgacgctcaagtcagaggtggcgaaacccgacaggactataaagataccaggcgtttccccctggaagctccctcgtgcgctctcctgttccgaccctgccgcttaccggatacctgtccgcctttctcccttcgggaagcgtggcgctttctcatagctcacgctgtaggtatctcagttcggtgtaggtcgttcgctccaagctgggctgtgtgcacgaaccccccgttcagcccgaccgctgcgccttatccggtaactatcgtcttgagtccaacccggtaagacacgacttatcgccactggcagcagccactggtaacaggattagcagagcgaggtatgtaggcggtgctacagagttcttgaagtggtggcctaactacggctacactagaagaacagtatttggtatctgcgctctgctgaagccagttaccttcggaaaaagagttggtagctcttgatccggcaaacaaaccaccgctggtagcggtggtttttttgtttgcaagcagcagattacgcgcagaaaaaaaggatctcaagaagatcctttgatcttttctacggggtctgacgctcagtggaacgaaaactcacgttaagggattttggtcatgagattatcaaaaaggatcttcacctagatccttttaaattaaaaatgaagttttaaatcaatctaaagtatatatgagtaaacttggtctgacagttaccaatgcttaatcagtgaggcacctatctcagcgatctgtctatttcgttcatccatagttgcctgactccccgtcgtgtagataactacgatacgggagggcttaccatctggccccagtgctgcaatgataccgcgagacccacgctcaccggctccagatttatcagcaataaaccagccagccggaagggccgagcgcagaagtggtcctgcaactttatccgcctccatccagtctattaattgttgccgggaagctagagtaagtagttcgccagttaatagtttgcgcaacgttgttgccattgctacaggcatcgtggtgtcacgctcgtcgtttggtatggcttcattcagctccggttcccaacgatcaaggcgagttacatgatcccccatgttgtgcaaaaaagcggttagctccttcggtcctccgatcgttgtcagaagtaagttggccgcagtgttatcactcatggttatggcagcactgcataattctcttactgtcatgccatccgtaagatgcttttctgtgactggtgagtactcaaccaagtcattctgagaatagtgtatgcggcgaccgagttgctcttgcccggcgtcaatacgggataataccgcgccacatagcagaactttaaaagtgctcatcattggaaaacgttcttcggggcgaaaactctcaaggatcttaccgctgttgagatccagttcgatgtaacccactcgtgcacccaactgatcttcagcatcttttactttcaccagcgtttctgggtgagcaaaaacaggaaggcaaaatgccgcaaaaaagggaataagggcgacacggaaatgttgaatactcatactcttcctttttcaatattattgaagcatttatcagggttattgtctcatgagcggatacatatttgaatgtatttagaaaaataaacaaataggggttccgcgcacatttccccgaaaagtgccacctgacgtctaagaaaccattattatcatgacattaacctataaaaataggcgtatcacgaggccctttcgtctcgcgcgtttcggtgatgacggtgaaaacctctgacacatgcagctcccggagacggtcacagcttgtctgtaagcggatgccgggagcagacaagcccgtcagggcgcgtcagcgggtgttggcgggtgtcggggctggcttaactatgcggcatcagagcagattgtactgagagtgcaccattcgacgctctcccttatgcgactcctgcattaggaagcagcccagtagtaggttgaggccgttgagcaccgccgccgcaaggaatggtctggcttatcgaaattaatacgactcactatagggagacc

SEQ ID NO: 98 - DNA, 6122 bp, synthetic construct
  source 1..6122: mol_type = other DNA
ggaattcgagctcgccccgttacataacttacggtaaatggcccgcctggctgaccgcccaacgacccccgcccattgacgtcaataatgacgtatgttcccatagtaacgccaatagggactttccattgacgtcaatgggtggagtatttacggtaaactgcccacttggcagtacatcaagtgtatcatatgccaagtacgccccctattgacgtcaatgacggtaaatggcccgcctggcattatgcccagtacatgaccttatgggactttcctacttggcagtacatctacgtattagtcatcgctattaccatggtgatgcggttttggcagtacatcaatgggcgtggatagcggtttgactcacggggatttccaagtctccaccccattgacgtcaatgggagtttgttttggcaccaaaatcaacgggactttccaaaatgtcgtaacaactccgccccattgacgcaaatgggcggtaggcgtgtacggtgggaggtctatataagcagagctcgtttagtgaaccgtcagatcgcctggagacgccatccacgctgttttgacctccatagaagacaccgggaccgatccagcctccgggggatcgatccccccgatcctgagaacttcagggtgagtttggggacccttgattgttctttctttttcgctattgtaaaattcatgttatatggagggggcaaagttttcagggtgttgtttagaatgggaagatgtcccttgtatcaccatggaccctcatgataattttgtttctttcactttctactctgttgacaaccattgtctcctcttattttcttttcattttctgtaactttttcgttaaactttagcttgcatttgtaacgaatttttaaattcacttttgtttatttgtcagattgtaagtactttctctaatcacttttttttcaaggcaatcagggtatattatattgtacttcagcacagttttagagaacaattgttataattaaatgataaggtagaatatttctgcatataaattctggctggcgtggaaatattcttattggtagaaacaactacatcctggtcatcatcctgcctttctctttatggttacaatgatatacactgtttgagatgaggataaaatactctgagtccaaaccgggcccctctgctaaccatgttcatgccttcttctttttcctacagctcctgggcaacgtgctggttattgtgctgtctcatcattttggcaaagaattgtaatacgactcactatagggcgaattcggatcccccggtagttaattaatacgcgtcactatgaagtgccttttgtacttagcctttttattcattggggtgaattgcaagttcaccatagtttttccacacaaccaaaaaggaaactggaaaaatgttccttctaattaccattattgcccgtcaagctcagatttaaattggcataatgacttaataggcacagccttacaagtcaaaatgccccagagtcacaaggctattcaagcagacggttggatgtgtcatgcttccaaatgggtcactacttgtgatttccgctggtatggaccgaagtatataacacattccatccgatccttcactccatctgtagaacaatgcaaggaaagcattgaacaaacgaaacaaggaacttggctgaatccaggcttccctcctcaaagttgtggatatgcaactgtgacggatgccgaagcagtgattgtccaggtgactcctcaccatgtgctggttgatgaatacacaggagaatgggttgattcacagttcatcaacggaaaatgcagcaattacatatgccccactgtccataactctacaacctggcattctgactataaggtcaaagggctatgtgattctaacctcatttccatggacatcaccttcttctcagaggacggagagctatcatccctgggaaaggagggcacagggttcagaagtaaccaatttgcttatgaaactggaggcaaggcctgcaaaatgcaatactgcaagcattggggagtcagactcccatcaggtgtctggttcgagatggctgataaggatctctttgctgcagccagattccctgaatgcccagaagggtcaagtatctctgctccatctcagacctcagtggatgtaagtctaattcaggacgttgagaggatcttggattattccctctgccaagaaacctggagcaaaatcagagcgggtcttccaatctctccagtggatctcagctatcttgctcctaaaaacccaggaaccggtcctgctttcaccataatcaatggtaccctaaaatactttgagaccagatacatcagagtcgatattgctgctccaatcctctcaagaatggtcggaatgatctccggaactaccacagaacaggaactgtgggatgactgggcgccatatgaagacgtggaaattggacccaatggagttctgaggaccagttcaggatataagtttcctttatacatgattggacatggtatgttggactccgatcttcatcttagctcaaaggctcaggtgttcgaacatcctcacattcaagacgctgcttcgcaacttcctgatgatgagagtttattttttggtgatactgggctatccaaaaatccaatcgagcttgtagaaggttggttcagtagttggaaaagctctattgcctcttttttctttatcatagggttaatcattggactattcttggttctccgagttggtatccatctttgcattaaattaaagcacaccaagaaaagacagatttatacagacatagagatgaaccgacttggaaagtaactcaaatcctgctaggtatgaaaaaaactaacagatatcacgcctaggactagtgtgaaatagacatcagaattaagaaaaacgtagggtccaagtggttccccgttatggactcgctatctgtcaaccagatcttataccctgaagttcacctagatagcccgatagttaccaataagatagtagccatcctggagtatgctcgactgtttaaacctgcaggcatgcaagctgatctttttccctctgccaaaaattatggggacatcatgaagccccttgagcatctgacttctggctaataaaggaaatttattttcattgcaatagtgtgttggaattttttgtgtctctcactcggaaggacatatgggagggcaaatcatttaaaacatcagaatgagtatttggtttagagtttggcaacatatgcccatatgctggctgccatgaacaaaggttggctataaagaggtcatcagtatatgaaacagccccctgctgtccattccttattccatagaaaagccttgacttgaggttagattttttttatattttgttttgtgttatttttttctttaacatccctaaaattttccttacatgttttactagccagatttttcctcctctcctgactactcccagtcatagctgtccctcttctcttatggagatccctcgaggagctttttgcaaaagcctaggcctccaaaaaagcctcttcactacttctggaatagctcagaagccgaggcggcctcggcctctgcataaataaaaaaaattagtcagccatggggcggagaatgggcggaactgggcggagttaggggcgggatgggcggagttaggggcgggactatggttgctgactaattgctgcattaatgaatcggccaacgcgcggggagaggcggtttgcgtattgggcgctcttccgcttcctcgctcactgactcgctgcgctcggtcgttcggctgcggcgagcggtatcagctcactcaaaggcggtaatacggttatccacagaatcaggggataacgcaggaaagaacatgtgagcaaaaggccagcaaaaggccaggaaccgtaaaaaggccgcgttgctggcgtttttccataggctccgcccccctgacgagcatcacaaaaatcgacgctcaagtcagaggtggcgaaacccgacaggactataaagataccaggcgtttccccctggaagctccctcgtgcgctctcctgttccgaccctgccgcttaccggatacctgtccgcctttctcccttcgggaagcgtggcgctttctcatagctcacgctgtaggtatctcagttcggtgtaggtcgttcgctccaagctgggctgtgtgcacgaaccccccgttcagcccgaccgctgcgccttatccggtaactatcgtcttgagtccaacccggtaagacacgacttatcgccactggcagcagccactggtaacaggattagcagagcgaggtatgtaggcggtgctacagagttcttgaagtggtggcctaactacggctacactagaagaacagtatttggtatctgcgctctgctgaagccagttaccttcggaaaaagagttggtagctcttgatccggcaaacaaaccaccgctggtagcggtggtttttttgtttgcaagcagcagattacgcgcagaaaaaaaggatctcaagaagatcctttgatcttttctacggggtctgacgctcagtggaacgaaaactcacgttaagggattttggtcatgagattatcaaaaaggatcttcacctagatccttttaaattaaaaatgaagttttaaatcaatctaaagtatatatgagtaaacttggtctgacagttaccaatgcttaatcagtgaggcacctatctcagcgatctgtctatttcgttcatccatagttgcctgactccccgtcgtgtagataactacgatacgggagggcttaccatctggccccagtgctgcaatgataccgcgagacccacgctcaccggctccagatttatcagcaataaaccagccagccggaagggccgagcgcagaagtggtcctgcaactttatccgcctccatccagtctattaattgttgccgggaagctagagtaagtagttcgccagttaatagtttgcgcaacgttgttgccattgctacaggcatcgtggtgtcacgctcgtcgtttggtatggcttcattcagctccggttcccaacgatcaaggcgagttacatgatcccccatgttgtgcaaaaaagcggttagctccttcggtcctccgatcgttgtcagaagtaagttggccgcagtgttatcactcatggttatggcagcactgcataattctcttactgtcatgccatccgtaagatgcttttctgtgactggtgagtactcaaccaagtcattctgagaatagtgtatgcggcgaccgagttgctcttgcccggcgtcaatacgggataataccgcgccacatagcagaactttaaaagtgctcatcattggaaaacgttcttcggggcgaaaactctcaaggatcttaccgctgttgagatccagttcgatgtaacccactcgtgcacccaactgatcttcagcatcttttactttcaccagcgtttctgggtgagcaaaaacaggaaggcaaaatgccgcaaaaaagggaataagggcgacacggaaatgttgaatactcatactcttcctttttcaatattattgaagcatttatcagggttattgtctcatgagcggatacatatttgaatgtatttagaaaaataaacaaataggggttccgcgcacatttccccgaaaagtgccacctgacgtctaagaaaccattattatcatgacattaacctataaaaataggcgtatcacgaggccctttcgtctcgcgcgtttcggtgatgacggtgaaaacctctgacacatgcagctcccggagacggtcacagcttgtctgtaagcggatgccgggagcagacaagcccgtcagggcgcgtcagcgggtgttggcgggtgtcggggctggcttaactatgcggcatcagagcagattgtactgagagtgcaccattcgacgctctcccttatgcgactcctgcattaggaagcagcccagtagtaggttgaggccgttgagcaccgccgccgcaaggaatggtctggcttatcgaaattaatacgactcactatagggagacc

SEQ ID NO: 99 - DNA, 5738 bp, synthetic construct
  source 1..5738: mol_type = other DNA
gaattcgagctcgccccgttacataacttacggtaaatggcccgcctggctgaccgcccaacgacccccgcccattgacgtcaataatgacgtatgttcccatagtaacgccaatagggactttccattgacgtcaatgggtggagtatttacggtaaactgcccacttggcagtacatcaagtgtatcatatgccaagtacgccccctattgacgtcaatgacggtaaatggcccgcctggcattatgcccagtacatgaccttatgggactttcctacttggcagtacatctacgtattagtcatcgctattaccatggtgatgcggttttggcagtacatcaatgggcgtggatagcggtttgactcacggggatttccaagtctccaccccattgacgtcaatgggagtttgttttggcaccaaaatcaacgggactttccaaaatgtcgtaacaactccgccccattgacgcaaatgggcggtaggcgtgtacggtgggaggtctatataagcagagctcgtttagtgaaccgtcagatcgcctggagacgccatccacgctgttttgacctccatagaagacaccgggaccgatccagcctccgggggatcgatccccccgatcctgagaacttcagggtgagtttggggacccttgattgttctttctttttcgctattgtaaaattcatgttatatggagggggcaaagttttcagggtgttgtttagaatgggaagatgtcccttgtatcaccatggaccctcatgataattttgtttctttcactttctactctgttgacaaccattgtctcctcttattttcttttcattttctgtaactttttcgttaaactttagcttgcatttgtaacgaatttttaaattcacttttgtttatttgtcagattgtaagtactttctctaatcacttttttttcaaggcaatcagggtatattatattgtacttcagcacagttttagagaacaattgttataattaaatgataaggtagaatatttctgcatataaattctggctggcgtggaaatattcttattggtagaaacaactacatcctggtcatcatcctgcctttctctttatggttacaatgatatacactgtttgagatgaggataaaatactctgagtccaaaccgggcccctctgctaaccatgttcatgccttcttctttttcctacagctcctgggcaacgtgctggttattgtgctgtctcatcattttggcaaagaattgtaatacgactcactatagggcgaattcggatccacgcgtcactatggaaaccgatactctgctgctgtgggtgctgctgctgtgggtgccagggtcaaccggaggcgccatggtggatacactgtctggcctgagctctgagcagggccagtctggagatatgaccatcgaggaggactccgccacacacattaaattcagcaagagagacgaagatggcaaagagctggccggcgcgacaatggagctgagggacagcagcggaaagaccatctcaacctggatctccgacggccaggtgaaagatttttacctgtaccccggcaagtatacctttgtggagacagccgctccagacggctacgaagtggccacagccatcacctttaccgtgaatgagcagggccaggtgaccgtgaacggcaaggccacaaaaggcgacgcccacattggctccggaggcagcggcaaggagatctgcggcaatcctgtgaccgataacgtgaaagacattaccaagctggtggccaacctgccaaatgactacatgattaccctgaactacgtggccggcatggacgtgctgccctcccattgttggctcagggatatggtgattcagctgtccctgagcctcaccacactgctcgacaagttcagcaacatcagcgagggactgagcaactacagcatcattgacaagctggggaagatcgttgatgacctggtgctgtgcatggaggagaacgcccctaagaacatcaaggagagcccaaagaggcctgagacccggagcttcacacctgaggagttcttcagcatcttcaacaggtccatcgacgcctttaaggacttcatggtggcttccgataccagtgactgtgtgctgtcctctaccttgggaccagagaaagatagcagggtgtccgtgacaaagcccttcatgctgccccctgtggcagccagctccctgaggaacgacagctcttccagcaataggaaggccgccaaggctcccgaggactcaggcctgcagtggacagccatggccctgcccgccctgatctctctggtgatcggcttcgccttcggcgccctgtactggaagaagaaacagagcagtctgacacgcgctgtggaaaatatccagatcaatgaagaggacaacgagatcagtatgctgcagcagaaggagagagagtttcaggaggtgggcagcggcggttccggcgactacaaggacgacgacgacaagtgagctagcctagtgtgaaatagacatcagaattaagaaaaacgtagggtccaagtggttccccgttatggactcgctatctgtcaaccagatcttataccctgaagttcacctagatagcccgatagttaccaataagatagtagccatcctggagtatgctcgactgtttaaacctgcaggcatgcaagctgatctttttccctctgccaaaaattatggggacatcatgaagccccttgagcatctgacttctggctaataaaggaaatttattttcattgcaatagtgtgttggaattttttgtgtctctcactcggaaggacatatgggagggcaaatcatttaaaacatcagaatgagtatttggtttagagtttggcaacatatgcccatatgctggctgccatgaacaaaggttggctataaagaggtcatcagtatatgaaacagccccctgctgtccattccttattccatagaaaagccttgacttgaggttagattttttttatattttgttttgtgttatttttttctttaacatccctaaaattttccttacatgttttactagccagatttttcctcctctcctgactactcccagtcatagctgtccctcttctcttatggagatccctcgaggagctttttgcaaaagcctaggcctccaaaaaagcctcttcactacttctggaatagctcagaggccgcggcctcggcctctgcataaataaaaaaaattagtcagccatggggcggagaatgggcggaactgggcggagttaggggcgggatgggcggagttaggggcgggactatggttgctgactaattgctgcattaatgaatcggccaacgcgcggggagaggcggtttgcgtattgggcgctcttccgcttcctcgctcactgactcgctgcgctcggtcgttcggctgcggcgagcggtatcagctcactcaaaggcggtaatacggttatccacagaatcaggggataacgcaggaaagaacatgtgagcaaaaggccagcaaaaggccaggaaccgtaaaaaggccgcgttgctggcgtttttccataggctccgcccccctgacgagcatcacaaaaatcgacgctcaagtcagaggtggcgaaacccgacaggactataaagataccaggcgtttccccctggaagctccctcgtgcgctctcctgttccgaccctgccgcttaccggatacctgtccgcctttctcccttcgggaagcgtggcgctttctcatagctcacgctgtaggtatctcagttcggtgtaggtcgttcgctccaagctgggctgtgtgcacgaaccccccgttcagcccgaccgctgcgccttatccggtaactatcgtcttgagtccaacccggtaagacacgacttatcgccactggcagcagccactggtaacaggattagcagagcgaggtatgtaggcggtgctacagagttcttgaagtggtggcctaactacggctacactagaagaacagtatttggtatctgcgctctgctgaagccagttaccttcggaaaaagagttggtagctcttgatccggcaaacaaaccaccgctggtagcggtggtttttttgtttgcaagcagcagattacgcgcagaaaaaaaggatctcaagaagatcctttgatcttttctacggggtctgacgctcagtggaacgaaaactcacgttaagggattttggtcatgagattatcaaaaaggatcttcacctagatccttttaaattaaaaatgaagttttaaatcaatctaaagtatatatgagtaaacttggtctgacagttaccaatgcttaatcagtgaggcacctatctcagcgatctgtctatttcgttcatccatagttgcctgactccccgtcgtgtagataactacgatacgggagggcttaccatctggccccagtgctgcaatgataccgcgagacccacgctcaccggctccagatttatcagcaataaaccagccagccggaagggccgagcgcagaagtggtcctgcaactttatccgcctccatccagtctattaattgttgccgggaagctagagtaagtagttcgccagttaatagtttgcgcaacgttgttgccattgctacaggcatcgtggtgtcacgctcgtcgtttggtatggcttcattcagctccggttcccaacgatcaaggcgagttacatgatcccccatgttgtgcaaaaaagcggttagctccttcggtcctccgatcgttgtcagaagtaagttggccgcagtgttatcactcatggttatggcagcactgcataattctcttactgtcatgccatccgtaagatgcttttctgtgactggtgagtactcaaccaagtcattctgagaatagtgtatgcggcgaccgagttgctcttgcccggcgtcaatacgggataataccgcgccacatagcagaactttaaaagtgctcatcattggaaaacgttcttcggggcgaaaactctcaaggatcttaccgctgttgagatccagttcgatgtaacccactcgtgcacccaactgatcttcagcatcttttactttcaccagcgtttctgggtgagcaaaaacaggaaggcaaaatgccgcaaaaaagggaataagggcgacacggaaatgttgaatactcatactcttcctttttcaatattattgaagcatttatcagggttattgtctcatgagcggatacatatttgaatgtatttagaaaaataaacaaataggggttccgcgcacatttccccgaaaagtgccacctgacgtctaagaaaccattattatcatgacattaacctataaaaataggcgtatcacgaggccctttcgtctcgcgcgtttcggtgatgacggtgaaaacctctgacacatgcagctcccggagacggtcacagcttgtctgtaagcggatgccgggagcagacaagcccgtcagggcgcgtcagcgggtgttggcgggtgtcggggctggcttaactatgcggcatcagagcagattgtactgagagtgcaccattcgacgctctcccttatgcgactcctgcattaggaagcagcccagtagtaggttgaggccgttgagcaccgccgccgcaaggaatggtctggcttatcgaaattaatacgactcactatagggagaccg

SEQ ID NO: 100 - DNA, 5717 bp, synthetic construct
  source 1..5717: mol_type = other DNA
gaattcgagctcgccccgttacataacttacggtaaatggcccgcctggctgaccgcccaacgacccccgcccattgacgtcaataatgacgtatgttcccatagtaacgccaatagggactttccattgacgtcaatgggtggagtatttacggtaaactgcccacttggcagtacatcaagtgtatcatatgccaagtacgccccctattgacgtcaatgacggtaaatggcccgcctggcattatgcccagtacatgaccttatgggactttcctacttggcagtacatctacgtattagtcatcgctattaccatggtgatgcggttttggcagtacatcaatgggcgtggatagcggtttgactcacggggatttccaagtctccaccccattgacgtcaatgggagtttgttttggcaccaaaatcaacgggactttccaaaatgtcgtaacaactccgccccattgacgcaaatgggcggtaggcgtgtacggtgggaggtctatataagcagagctcgtttagtgaaccgtcagatcgcctggagacgccatccacgctgttttgacctccatagaagacaccgggaccgatccagcctccgggggatcgatccccccgatcctgagaacttcagggtgagtttggggacccttgattgttctttctttttcgctattgtaaaattcatgttatatggagggggcaaagttttcagggtgttgtttagaatgggaagatgtcccttgtatcaccatggaccctcatgataattttgtttctttcactttctactctgttgacaaccattgtctcctcttattttcttttcattttctgtaactttttcgttaaactttagcttgcatttgtaacgaatttttaaattcacttttgtttatttgtcagattgtaagtactttctctaatcacttttttttcaaggcaatcagggtatattatattgtacttcagcacagttttagagaacaattgttataattaaatgataaggtagaatatttctgcatataaattctggctggcgtggaaatattcttattggtagaaacaactacatcctggtcatcatcctgcctttctctttatggttacaatgatatacactgtttgagatgaggataaaatactctgagtccaaaccgggcccctctgctaaccatgttcatgccttcttctttttcctacagctcctgggcaacgtgctggttattgtgctgtctcatcattttggcaaagaattgtaatacgactcactatagggcgaattcggatccacgcgtcactatggaaaccgatactctgctgctgtgggtgctgctgctgtgggtgccagggtcaaccggaggcgccatggtggatacactgtctggcctgagctctgagcagggccagtctggagatatgaccatcgaggaggactccgccacacacattaaattcagcaagagagacgaagatggcaaagagctggccggcgcgacaatggagctgagggacagcagcggaaagaccatctcaacctggatctccgacggccaggtgaaagatttttacctgtaccccggcaagtatacctttgtggagacagccgctccagacggctacgaagtggccacagccatcacctttaccgtgaatgagcagggccaggtgaccgtgaacggcaaggccacaaaaggcgacgcccacattggctccggaggcagcggcgacatccagatgacccagagccccagcagcctgagcgccagcgtgggcgaccgcgtgaccatcacctgcagcgccagcagcagcgtgagctacatgaactggtaccagcagaagcccggcaaggcccccaagcgcctgatctacgacaccagcaagctggccagcggcgtgcccagccgcttcagcggcagcggcagcggcaccgacttcaccctgaccatcagcagcctgcagcccgaggacttcgccacctactactgccagcagtggagcagcaacccccccaccttcggcggcggcaccaaggtggagatcaagggcggcggcggcagcggcggcggcggcagcggcggcggcggcagccaggtgcagctggtgcagagcggcgccgaggtgaagaagcccggcgccagcgtgaaggtgagctgcaaggccagcggctacaccttcatcagctacaccatgcactgggtgcgccaggcccccggccagggcctggagtggatgggctacatcaacccccgcagcggctacacccactacaaccagaagctgaaggacaaggccaccctgaccgccgacaagagcgccagcaccgcctacatggagctgagcagcctgcgcagcgaggacaccgccgtgtactactgcgcccgcagcgcctactacgactacgacggcttcgcctactggggccagggcaccctggtgaccgtgagcagcggcagcggcggttccggcgactacaaggacgacgacgacaagtgagctagcctagtgtgaaatagacatcagaattaagaaaaacgtagggtccaagtggttccccgttatggactcgctatctgtcaaccagatcttataccctgaagttcacctagatagcccgatagttaccaataagatagtagccatcctggagtatgctcgactgtttaaacctgcaggcatgcaagctgatctttttccctctgccaaaaattatggggacatcatgaagccccttgagcatctgacttctggctaataaaggaaatttattttcattgcaatagtgtgttggaattttttgtgtctctcactcggaaggacatatgggagggcaaatcatttaaaacatcagaatgagtatttggtttagagtttggcaacatatgcccatatgctggctgccatgaacaaaggttggctataaagaggtcatcagtatatgaaacagccccctgctgtccattccttattccatagaaaagccttgacttgaggttagattttttttatattttgttttgtgttatttttttctttaacatccctaaaattttccttacatgttttactagccagatttttcctcctctcctgactactcccagtcatagctgtccctcttctcttatggagatccctcgaggagctttttgcaaaagcctaggcctccaaaaaagcctcttcactacttctggaatagctcagaggccgcggcctcggcctctgcataaataaaaaaaattagtcagccatggggcggagaatgggcggaactgggcggagttaggggcgggatgggcggagttaggggcgggactatggttgctgactaattgctgcattaatgaatcggccaacgcgcggggagaggcggtttgcgtattgggcgctcttccgcttcctcgctcactgactcgctgcgctcggtcgttcggctgcggcgagcggtatcagctcactcaaaggcggtaatacggttatccacagaatcaggggataacgcaggaaagaacatgtgagcaaaaggccagcaaaaggccaggaaccgtaaaaaggccgcgttgctggcgtttttccataggctccgcccccctgacgagcatcacaaaaatcgacgctcaagtcagaggtggcgaaacccgacaggactataaagataccaggcgtttccccctggaagctccctcgtgcgctctcctgttccgaccctgccgcttaccggatacctgtccgcctttctcccttcgggaagcgtggcgctttctcatagctcacgctgtaggtatctcagttcggtgtaggtcgttcgctccaagctgggctgtgtgcacgaaccccccgttcagcccgaccgctgcgccttatccggtaactatcgtcttgagtccaacccggtaagacacgacttatcgccactggcagcagccactggtaacaggattagcagagcgaggtatgtaggcggtgctacagagttcttgaagtggtggcctaactacggctacactagaagaacagtatttggtatctgcgctctgctgaagccagttaccttcggaaaaagagttggtagctcttgatccggcaaacaaaccaccgctggtagcggtggtttttttgtttgcaagcagcagattacgcgcagaaaaaaaggatctcaagaagatcctttgatcttttctacggggtctgacgctcagtggaacgaaaactcacgttaagggattttggtcatgagattatcaaaaaggatcttcacctagatccttttaaattaaaaatgaagttttaaatcaatctaaagtatatatgagtaaacttggtctgacagttaccaatgcttaatcagtgaggcacctatctcagcgatctgtctatttcgttcatccatagttgcctgactccccgtcgtgtagataactacgatacgggagggcttaccatctggccccagtgctgcaatgataccgcgagacccacgctcaccggctccagatttatcagcaataaaccagccagccggaagggccgagcgcagaagtggtcctgcaactttatccgcctccatccagtctattaattgttgccgggaagctagagtaagtagttcgccagttaatagtttgcgcaacgttgttgccattgctacaggcatcgtggtgtcacgctcgtcgtttggtatggcttcattcagctccggttcccaacgatcaaggcgagttacatgatcccccatgttgtgcaaaaaagcggttagctccttcggtcctccgatcgttgtcagaagtaagttggccgcagtgttatcactcatggttatggcagcactgcataattctcttactgtcatgccatccgtaagatgcttttctgtgactggtgagtactcaaccaagtcattctgagaatagtgtatgcggcgaccgagttgctcttgcccggcgtcaatacgggataataccgcgccacatagcagaactttaaaagtgctcatcattggaaaacgttcttcggggcgaaaactctcaaggatcttaccgctgttgagatccagttcgatgtaacccactcgtgcacccaactgatcttcagcatcttttactttcaccagcgtttctgggtgagcaaaaacaggaaggcaaaatgccgcaaaaaagggaataagggcgacacggaaatgttgaatactcatactcttcctttttcaatattattgaagcatttatcagggttattgtctcatgagcggatacatatttgaatgtatttagaaaaataaacaaataggggttccgcgcacatttccccgaaaagtgccacctgacgtctaagaaaccattattatcatgacattaacctataaaaataggcgtatcacgaggccctttcgtctcgcgcgtttcggtgatgacggtgaaaacctctgacacatgcagctcccggagacggtcacagcttgtctgtaagcggatgccgggagcagacaagcccgtcagggcgcgtcagcgggtgttggcgggtgtcggggctggcttaactatgcggcatcagagcagattgtactgagagtgcaccattcgacgctctcccttatgcgactcctgcattaggaagcagcccagtagtaggttgaggccgttgagcaccgccgccgcaaggaatggtctggcttatcgaaattaatacgactcactatagggagaccg

SEQ ID NO: 101 - DNA, 5717 bp, synthetic construct
  source 1..5717: mol_type = other DNA
gaattcgagctcgccccgttacataacttacggtaaatggcccgcctggctgaccgcccaacgacccccgcccattgacgtcaataatgacgtatgttcccatagtaacgccaatagggactttccattgacgtcaatgggtggagtatttacggtaaactgcccacttggcagtacatcaagtgtatcatatgccaagtacgccccctattgacgtcaatgacggtaaatggcccgcctggcattatgcccagtacatgaccttatgggactttcctacttggcagtacatctacgtattagtcatcgctattaccatggtgatgcggttttggcagtacatcaatgggcgtggatagcggtttgactcacggggatttccaagtctccaccccattgacgtcaatgggagtttgttttggcaccaaaatcaacgggactttccaaaatgtcgtaacaactccgccccattgacgcaaatgggcggtaggcgtgtacggtgggaggtctatataagcagagctcgtttagtgaaccgtcagatcgcctggagacgccatccacgctgttttgacctccatagaagacaccgggaccgatccagcctccgggggatcgatccccccgatcctgagaacttcagggtgagtttggggacccttgattgttctttctttttcgctattgtaaaattcatgttatatggagggggcaaagttttcagggtgttgtttagaatgggaagatgtcccttgtatcaccatggaccctcatgataattttgtttctttcactttctactctgttgacaaccattgtctcctcttattttcttttcattttctgtaactttttcgttaaactttagcttgcatttgtaacgaatttttaaattcacttttgtttatttgtcagattgtaagtactttctctaatcacttttttttcaaggcaatcagggtatattatattgtacttcagcacagttttagagaacaattgttataattaaatgataaggtagaatatttctgcatataaattctggctggcgtggaaatattcttattggtagaaacaactacatcctggtcatcatcctgcctttctctttatggttacaatgatatacactgtttgagatgaggataaaatactctgagtccaaaccgggcccctctgctaaccatgttcatgccttcttctttttcctacagctcctgggcaacgtgctggttattgtgctgtctcatcattttggcaaagaattgtaatacgactcactatagggcgaattcggatccacgcgtcactatggaaaccgatactctgctgctgtgggtgctgctgctgtgggtgccagggtcaaccggaggcgccatggtggatacactgtctggcctgagctctgagcagggccagtctggagatatgaccatcgaggaggactccgccacacacattaaattcagcaagagagacgaagatggcaaagagctggccggcgcgacaatggagctgagggacagcagcggaaagaccatctcaacctggatctccgacggccaggtgaaagatttttacctgtaccccggcaagtatacctttgtggagacagccgctccagacggctacgaagtggccacagccatcacctttaccgtgaatgagcagggccaggtgaccgtgaacggcaaggccacaaaaggcgacgcccacattggctccggaggcagcggccagatcgtgctgacccagagccccgccatcatgagcgccagccccggcgagaaggtgaccatgacctgcagcgccagcagcagcgtgagctacatgaactggtaccagcagaagagcggcaccagccccaagcgctggatctacgacaccagcaagctggccagcggcgtgcccgcccacttccgcggcagcggcagcggcaccagctacagcctgaccatcagcggcatggaggccgaggacgccgccacctactactgccagcagtggagcagcaaccccttcaccttcggcagcggcaccaagctggagatcaaccgcggcggcggcggcagcggcggcggcggcagcggcggcggcggcagccaggtgcagctgcagcagagcggcgccgagctggcccgccccggcgccagcgtgaagatgagctgcaaggccagcggctacaccttcacccgctacaccatgcactgggtgaagcagcgccccggccagggcctggagtggatcggctacatcaaccccagccgcggctacaccaactacaaccagaagttcaaggacaaggccaccctgaccaccgacaagagcagcagcaccgcctacatgcagctgagcagcctgaccagcgaggacagcgccgtgtactactgcgcccgctactacgacgaccactactgcctggactactggggccagggcaccaccctgaccgtgagcagcggcagcggcggttccggcgactacaaggacgacgacgacaagtgagctagcctagtgtgaaatagacatcagaattaagaaaaacgtagggtccaagtggttccccgttatggactcgctatctgtcaaccagatcttataccctgaagttcacctagatagcccgatagttaccaataagatagtagccatcctggagtatgctcgactgtttaaacctgcaggcatgcaagctgatctttttccctctgccaaaaattatggggacatcatgaagccccttgagcatctgacttctggctaataaaggaaatttattttcattgcaatagtgtgttggaattttttgtgtctctcactcggaaggacatatgggagggcaaatcatttaaaacatcagaatgagtatttggtttagagtttggcaacatatgcccatatgctggctgccatgaacaaaggttggctataaagaggtcatcagtatatgaaacagccccctgctgtccattccttattccatagaaaagccttgacttgaggttagattttttttatattttgttttgtgttatttttttctttaacatccctaaaattttccttacatgttttactagccagatttttcctcctctcctgactactcccagtcatagctgtccctcttctcttatggagatccctcgaggagctttttgcaaaagcctaggcctccaaaaaagcctcttcactacttctggaatagctcagaggccgcggcctcggcctctgcataaataaaaaaaattagtcagccatggggcggagaatgggcggaactgggcggagttaggggcgggatgggcggagttaggggcgggactatggttgctgactaattgctgcattaatgaatcggccaacgcgcggggagaggcggtttgcgtattgggcgctcttccgcttcctcgctcactgactcgctgcgctcggtcgttcggctgcggcgagcggtatcagctcactcaaaggcggtaatacggttatccacagaatcaggggataacgcaggaaagaacatgtgagcaaaaggccagcaaaaggccaggaaccgtaaaaaggccgcgttgctggcgtttttccataggctccgcccccctgacgagcatcacaaaaatcgacgctcaagtcagaggtggcgaaacccgacaggactataaagataccaggcgtttccccctggaagctccctcgtgcgctctcctgttccgaccctgccgcttaccggatacctgtccgcctttctcccttcgggaagcgtggcgctttctcatagctcacgctgtaggtatctcagttcggtgtaggtcgttcgctccaagctgggctgtgtgcacgaaccccccgttcagcccgaccgctgcgccttatccggtaactatcgtcttgagtccaacccggtaagacacgacttatcgccactggcagcagccactggtaacaggattagcagagcgaggtatgtaggcggtgctacagagttcttgaagtggtggcctaactacggctacactagaagaacagtatttggtatctgcgctctgctgaagccagttaccttcggaaaaagagttggtagctcttgatccggcaaacaaaccaccgctggtagcggtggtttttttgtttgcaagcagcagattacgcgcagaaaaaaaggatctcaagaagatcctttgatcttttctacggggtctgacgctcagtggaacgaaaactcacgttaagggattttggtcatgagattatcaaaaaggatcttcacctagatccttttaaattaaaaatgaagttttaaatcaatctaaagtatatatgagtaaacttggtctgacagttaccaatgcttaatcagtgaggcacctatctcagcgatctgtctatttcgttcatccatagttgcctgactccccgtcgtgtagataactacgatacgggagggcttaccatctggccccagtgctgcaatgataccgcgagacccacgctcaccggctccagatttatcagcaataaaccagccagccggaagggccgagcgcagaagtggtcctgcaactttatccgcctccatccagtctattaattgttgccgggaagctagagtaagtagttcgccagttaatagtttgcgcaacgttgttgccattgctacaggcatcgtggtgtcacgctcgtcgtttggtatggcttcattcagctccggttcccaacgatcaaggcgagttacatgatcccccatgttgtgcaaaaaagcggttagctccttcggtcctccgatcgttgtcagaagtaagttggccgcagtgttatcactcatggttatggcagcactgcataattctcttactgtcatgccatccgtaagatgcttttctgtgactggtgagtactcaaccaagtcattctgagaatagtgtatgcggcgaccgagttgctcttgcccggcgtcaatacgggataataccgcgccacatagcagaactttaaaagtgctcatcattggaaaacgttcttcggggcgaaaactctcaaggatcttaccgctgttgagatccagttcgatgtaacccactcgtgcacccaactgatcttcagcatcttttactttcaccagcgtttctgggtgagcaaaaacaggaaggcaaaatgccgcaaaaaagggaataagggcgacacggaaatgttgaatactcatactcttcctttttcaatattattgaagcatttatcagggttattgtctcatgagcggatacatatttgaatgtatttagaaaaataaacaaataggggttccgcgcacatttccccgaaaagtgccacctgacgtctaagaaaccattattatcatgacattaacctataaaaataggcgtatcacgaggccctttcgtctcgcgcgtttcggtgatgacggtgaaaacctctgacacatgcagctcccggagacggtcacagcttgtctgtaagcggatgccgggagcagacaagcccgtcagggcgcgtcagcgggtgttggcgggtgtcggggctggcttaactatgcggcatcagagcagattgtactgagagtgcaccattcgacgctctcccttatgcgactcctgcattaggaagcagcccagtagtaggttgaggccgttgagcaccgccgccgcaaggaatggtctggcttatcgaaattaatacgactcactatagggagaccg

SEQ ID NO: 102 - DNA, 5714 bp, synthetic construct
  source 1..5714: mol_type = other DNA
gaattcgagctcgccccgttacataacttacggtaaatggcccgcctggctgaccgcccaacgacccccgcccattgacgtcaataatgacgtatgttcccatagtaacgccaatagggactttccattgacgtcaatgggtggagtatttacggtaaactgcccacttggcagtacatcaagtgtatcatatgccaagtacgccccctattgacgtcaatgacggtaaatggcccgcctggcattatgcccagtacatgaccttatgggactttcctacttggcagtacatctacgtattagtcatcgctattaccatggtgatgcggttttggcagtacatcaatgggcgtggatagcggtttgactcacggggatttccaagtctccaccccattgacgtcaatgggagtttgttttggcaccaaaatcaacgggactttccaaaatgtcgtaacaactccgccccattgacgcaaatgggcggtaggcgtgtacggtgggaggtctatataagcagagctcgtttagtgaaccgtcagatcgcctggagacgccatccacgctgttttgacctccatagaagacaccgggaccgatccagcctccgggggatcgatccccccgatcctgagaacttcagggtgagtttggggacccttgattgttctttctttttcgctattgtaaaattcatgttatatggagggggcaaagttttcagggtgttgtttagaatgggaagatgtcccttgtatcaccatggaccctcatgataattttgtttctttcactttctactctgttgacaaccattgtctcctcttattttcttttcattttctgtaactttttcgttaaactttagcttgcatttgtaacgaatttttaaattcacttttgtttatttgtcagattgtaagtactttctctaatcacttttttttcaaggcaatcagggtatattatattgtacttcagcacagttttagagaacaattgttataattaaatgataaggtagaatatttctgcatataaattctggctggcgtggaaatattcttattggtagaaacaactacatcctggtcatcatcctgcctttctctttatggttacaatgatatacactgtttgagatgaggataaaatactctgagtccaaaccgggcccctctgctaaccatgttcatgccttcttctttttcctacagctcctgggcaacgtgctggttattgtgctgtctcatcattttggcaaagaattgtaatacgactcactatagggcgaattcggatccacgcgtcactatggaaaccgatactctgctgctgtgggtgctgctgctgtgggtgccagggtcaaccggaggcgccatggtggatacactgtctggcctgagctctgagcagggccagtctggagatatgaccatcgaggaggactccgccacacacattaaattcagcaagagagacgaagatggcaaagagctggccggcgcgacaatggagctgagggacagcagcggaaagaccatctcaacctggatctccgacggccaggtgaaagatttttacctgtaccccggcaagtatacctttgtggagacagccgctccagacggctacgaagtggccacagccatcacctttaccgtgaatgagcagggccaggtgaccgtgaacggcaaggccacaaaaggcgacgcccacattggctccggaggcagcggccagatcgtgctgacccagagccccgccatcatgagcgccagccccggcgagaaggtgaccatgacctgccgcgccagcagcagcgtgagctacatgaactggtaccagcagaagagcggcaccagccccaagcgctggatctacgacaccagcaaggtggccagcggcgtgccctaccgcttcagcggcagcggcagcggcaccagctacagcctgaccatcagcagcatggaggccgaggacgccgccacctactactgccagcagtggagcagcaaccccctgaccttcggcgccggcaccaagctggagctgaagggcggcggcggcagcggcggcggcggcagcggcggcggcggcagccaggtgcagctgcagcagagcggcgccgagctggcccgccccggcgccagcgtgaagatgagctgcaagaccagcggctacaccttcacccgctacaccatgcactgggtgaagcagcgccccggccagggcctggagtggatcggctacatcaaccccagccgcggctacaccaactacaaccagaagttcaaggacaaggccaccctgaccaccgacaagagcagcagcaccgcctacatgcagctgagcagcctgaccagcgaggacagcgccgtgtactactgcgcccgctactacgacgaccactacagcctggactactggggccagggcaccaccctgaccgtgagcagcggcagcggcggttccggcgactacaaggacgacgacgacaagtgagctagcctagtgtgaaatagacatcagaattaagaaaaacgtagggtccaagtggttccccgttatggactcgctatctgtcaaccagatcttataccctgaagttcacctagatagcccgatagttaccaataagatagtagccatcctggagtatgctcgactgtttaaacctgcaggcatgcaagctgatctttttccctctgccaaaaattatggggacatcatgaagccccttgagcatctgacttctggctaataaaggaaatttattttcattgcaatagtgtgttggaattttttgtgtctctcactcggaaggacatatgggagggcaaatcatttaaaacatcagaatgagtatttggtttagagtttggcaacatatgcccatatgctggctgccatgaacaaaggttggctataaagaggtcatcagtatatgaaacagccccctgctgtccattccttattccatagaaaagccttgacttgaggttagattttttttatattttgttttgtgttatttttttctttaacatccctaaaattttccttacatgttttactagccagatttttcctcctctcctgactactcccagtcatagctgtccctcttctcttatggagatccctcgaggagctttttgcaaaagcctaggcctccaaaaaagcctcttcactacttctggaatagctcagaggccgcggcctcggcctctgcataaataaaaaaaattagtcagccatggggcggagaatgggcggaactgggcggagttaggggcgggatgggcggagttaggggcgggactatggttgctgactaattgctgcattaatgaatcggccaacgcgcggggagaggcggtttgcgtattgggcgctcttccgcttcctcgctcactgactcgctgcgctcggtcgttcggctgcggcgagcggtatcagctcactcaaaggcggtaatacggttatccacagaatcaggggataacgcaggaaagaacatgtgagcaaaaggccagcaaaaggccaggaaccgtaaaaaggccgcgttgctggcgtttttccataggctccgcccccctgacgagcatcacaaaaatcgacgctcaagtcagaggtggcgaaacccgacaggactataaagataccaggcgtttccccctggaagctccctcgtgcgctctcctgttccgaccctgccgcttaccggatacctgtccgcctttctcccttcgggaagcgtggcgctttctcatagctcacgctgtaggtatctcagttcggtgtaggtcgttcgctccaagctgggctgtgtgcacgaaccccccgttcagcccgaccgctgcgccttatccggtaactatcgtcttgagtccaacccggtaagacacgacttatcgccactggcagcagccactggtaacaggattagcagagcgaggtatgtaggcggtgctacagagttcttgaagtggtggcctaactacggctacactagaagaacagtatttggtatctgcgctctgctgaagccagttaccttcggaaaaagagttggtagctcttgatccggcaaacaaaccaccgctggtagcggtggtttttttgtttgcaagcagcagattacgcgcagaaaaaaaggatctcaagaagatcctttgatcttttctacggggtctgacgctcagtggaacgaaaactcacgttaagggattttggtcatgagattatcaaaaaggatcttcacctagatccttttaaattaaaaatgaagttttaaatcaatctaaagtatatatgagtaaacttggtctgacagttaccaatgcttaatcagtgaggcacctatctcagcgatctgtctatttcgttcatccatagttgcctgactccccgtcgtgtagataactacgatacgggagggcttaccatctggccccagtgctgcaatgataccgcgagacccacgctcaccggctccagatttatcagcaataaaccagccagccggaagggccgagcgcagaagtggtcctgcaactttatccgcctccatccagtctattaattgttgccgggaagctagagtaagtagttcgccagttaatagtttgcgcaacgttgttgccattgctacaggcatcgtggtgtcacgctcgtcgtttggtatggcttcattcagctccggttcccaacgatcaaggcgagttacatgatcccccatgttgtgcaaaaaagcggttagctccttcggtcctccgatcgttgtcagaagtaagttggccgcagtgttatcactcatggttatggcagcactgcataattctcttactgtcatgccatccgtaagatgcttttctgtgactggtgagtactcaaccaagtcattctgagaatagtgtatgcggcgaccgagttgctcttgcccggcgtcaatacgggataataccgcgccacatagcagaactttaaaagtgctcatcattggaaaacgttcttcggggcgaaaactctcaaggatcttaccgctgttgagatccagttcgatgtaacccactcgtgcacccaactgatcttcagcatcttttactttcaccagcgtttctgggtgagcaaaaacaggaaggcaaaatgccgcaaaaaagggaataagggcgacacggaaatgttgaatactcatactcttcctttttcaatattattgaagcatttatcagggttattgtctcatgagcggatacatatttgaatgtatttagaaaaataaacaaataggggttccgcgcacatttccccgaaaagtgccacctgacgtctaagaaaccattattatcatgacattaacctataaaaataggcgtatcacgaggccctttcgtctcgcgcgtttcggtgatgacggtgaaaacctctgacacatgcagctcccggagacggtcacagcttgtctgtaagcggatgccgggagcagacaagcccgtcagggcgcgtcagcgggtgttggcgggtgtcggggctggcttaactatgcggcatcagagcagattgtactgagagtgcaccattcgacgctctcccttatgcgactcctgcattaggaagcagcccagtagtaggttgaggccgttgagcaccgccgccgcaaggaatggtctggcttatcgaaattaatacgactcactatagggagaccg

SEQ ID NO: 103 - DNA, 5714 bp, synthetic construct
  source 1..5714: mol_type = other DNA
gaattcgagctcgccccgttacataacttacggtaaatggcccgcctggctgaccgcccaacgacccccgcccattgacgtcaataatgacgtatgttcccatagtaacgccaatagggactttccattgacgtcaatgggtggagtatttacggtaaactgcccacttggcagtacatcaagtgtatcatatgccaagtacgccccctattgacgtcaatgacggtaaatggcccgcctggcattatgcccagtacatgaccttatgggactttcctacttggcagtacatctacgtattagtcatcgctattaccatggtgatgcggttttggcagtacatcaatgggcgtggatagcggtttgactcacggggatttccaagtctccaccccattgacgtcaatgggagtttgttttggcaccaaaatcaacgggactttccaaaatgtcgtaacaactccgccccattgacgcaaatgggcggtaggcgtgtacggtgggaggtctatataagcagagctcgtttagtgaaccgtcagatcgcctggagacgccatccacgctgttttgacctccatagaagacaccgggaccgatccagcctccgggggatcgatccccccgatcctgagaacttcagggtgagtttggggacccttgattgttctttctttttcgctattgtaaaattcatgttatatggagggggcaaagttttcagggtgttgtttagaatgggaagatgtcccttgtatcaccatggaccctcatgataattttgtttctttcactttctactctgttgacaaccattgtctcctcttattttcttttcattttctgtaactttttcgttaaactttagcttgcatttgtaacgaatttttaaattcacttttgtttatttgtcagattgtaagtactttctctaatcacttttttttcaaggcaatcagggtatattatattgtacttcagcacagttttagagaacaattgttataattaaatgataaggtagaatatttctgcatataaattctggctggcgtggaaatattcttattggtagaaacaactacatcctggtcatcatcctgcctttctctttatggttacaatgatatacactgtttgagatgaggataaaatactctgagtccaaaccgggcccctctgctaaccatgttcatgccttcttctttttcctacagctcctgggcaacgtgctggttattgtgctgtctcatcattttggcaaagaattgtaatacgactcactatagggcgaattcggatccacgcgtcactatggaaaccgatactctgctgctgtgggtgctgctgctgtgggtgccagggtcaaccggaggcgccatggtggatacactgtctggcctgagctctgagcagggccagtctggagatatgaccatcgaggaggactccgccacacacattaaattcagcaagagagacgaagatggcaaagagctggccggcgcgacaatggagctgagggacagcagcggaaagaccatctcaacctggatctccgacggccaggtgaaagatttttacctgtaccccggcaagtatacctttgtggagacagccgctccagacggctacgaagtggccacagccatcacctttaccgtgaatgagcagggccaggtgaccgtgaacggcaaggccacaaaaggcgacgcccacattggctccggaggcagcggccagatcgtgctgacccagagccccagcagcctgagcgccagcctgggcgagaaggtgaccatgacctgccgcgccagcagcagcgtgagctacatgaactggtaccagcagaagcccggcaccagccccaagcgctggatctacgacaccagcaaggtggccagcggcgtgcccgaccgcttcagcggcagcggcagcggcaccagctacagcctgaccatcagcagcatggaggccgaggacgccgccacctactactgccagcagtggagcagcaaccccctgaccttcggcgccggcaccaagctggagctgaagggcggcggcggcagcggcggcggcggcagcggcggcggcggcagccaggtgcagctgcagcagagcggcgccgagctggcccgccccggcgccagcgtgaagatgagctgcaagaccagcggctacaccttcacccgctacaccatgcactgggtgaagcagcgccccggccagggcctggagtggatcggctacatcaaccccagccgcggctacaccaactacaaccagaagttcaaggacaaggccaccctgaccaccgacaagagcagcagcaccgcctacatgcagctgagcagcctgaccagcgaggacagcgccgtgtactactgcgcccgctactacgacgaccactacagcctggactactggggccagggcaccaccctgaccgtgagcagcggcagcggcggttccggcgactacaaggacgacgacgacaagtgagctagcctagtgtgaaatagacatcagaattaagaaaaacgtagggtccaagtggttccccgttatggactcgctatctgtcaaccagatcttataccctgaagttcacctagatagcccgatagttaccaataagatagtagccatcctggagtatgctcgactgtttaaacctgcaggcatgcaagctgatctttttccctctgccaaaaattatggggacatcatgaagccccttgagcatctgacttctggctaataaaggaaatttattttcattgcaatagtgtgttggaattttttgtgtctctcactcggaaggacatatgggagggcaaatcatttaaaacatcagaatgagtatttggtttagagtttggcaacatatgcccatatgctggctgccatgaacaaaggttggctataaagaggtcatcagtatatgaaacagccccctgctgtccattccttattccatagaaaagccttgacttgaggttagattttttttatattttgttttgtgttatttttttctttaacatccctaaaattttccttacatgttttactagccagatttttcctcctctcctgactactcccagtcatagctgtccctcttctcttatggagatccctcgaggagctttttgcaaaagcctaggcctccaaaaaagcctcttcactacttctggaatagctcagaggccgcggcctcggcctctgcataaataaaaaaaattagtcagccatggggcggagaatgggcggaactgggcggagttaggggcgggatgggcggagttaggggcgggactatggttgctgactaattgctgcattaatgaatcggccaacgcgcggggagaggcggtttgcgtattgggcgctcttccgcttcctcgctcactgactcgctgcgctcggtcgttcggctgcggcgagcggtatcagctcactcaaaggcggtaatacggttatccacagaatcaggggataacgcaggaaagaacatgtgagcaaaaggccagcaaaaggccaggaaccgtaaaaaggccgcgttgctggcgtttttccataggctccgcccccctgacgagcatcacaaaaatcgacgctcaagtcagaggtggcgaaacccgacaggactataaagataccaggcgtttccccctggaagctccctcgtgcgctctcctgttccgaccctgccgcttaccggatacctgtccgcctttctcccttcgggaagcgtggcgctttctcatagctcacgctgtaggtatctcagttcggtgtaggtcgttcgctccaagctgggctgtgtgcacgaaccccccgttcagcccgaccgctgcgccttatccggtaactatcgtcttgagtccaacccggtaagacacgacttatcgccactggcagcagccactggtaacaggattagcagagcgaggtatgtaggcggtgctacagagttcttgaagtggtggcctaactacggctacactagaagaacagtatttggtatctgcgctctgctgaagccagttaccttcggaaaaagagttggtagctcttgatccggcaaacaaaccaccgctggtagcggtggtttttttgtttgcaagcagcagattacgcgcagaaaaaaaggatctcaagaagatcctttgatcttttctacggggtctgacgctcagtggaacgaaaactcacgttaagggattttggtcatgagattatcaaaaaggatcttcacctagatccttttaaattaaaaatgaagttttaaatcaatctaaagtatatatgagtaaacttggtctgacagttaccaatgcttaatcagtgaggcacctatctcagcgatctgtctatttcgttcatccatagttgcctgactccccgtcgtgtagataactacgatacgggagggcttaccatctggccccagtgctgcaatgataccgcgagacccacgctcaccggctccagatttatcagcaataaaccagccagccggaagggccgagcgcagaagtggtcctgcaactttatccgcctccatccagtctattaattgttgccgggaagctagagtaagtagttcgccagttaatagtttgcgcaacgttgttgccattgctacaggcatcgtggtgtcacgctcgtcgtttggtatggcttcattcagctccggttcccaacgatcaaggcgagttacatgatcccccatgttgtgcaaaaaagcggttagctccttcggtcctccgatcgttgtcagaagtaagttggccgcagtgttatcactcatggttatggcagcactgcataattctcttactgtcatgccatccgtaagatgcttttctgtgactggtgagtactcaaccaagtcattctgagaatagtgtatgcggcgaccgagttgctcttgcccggcgtcaatacgggataataccgcgccacatagcagaactttaaaagtgctcatcattggaaaacgttcttcggggcgaaaactctcaaggatcttaccgctgttgagatccagttcgatgtaacccactcgtgcacccaactgatcttcagcatcttttactttcaccagcgtttctgggtgagcaaaaacaggaaggcaaaatgccgcaaaaaagggaataagggcgacacggaaatgttgaatactcatactcttcctttttcaatattattgaagcatttatcagggttattgtctcatgagcggatacatatttgaatgtatttagaaaaataaacaaataggggttccgcgcacatttccccgaaaagtgccacctgacgtctaagaaaccattattatcatgacattaacctataaaaataggcgtatcacgaggccctttcgtctcgcgcgtttcggtgatgacggtgaaaacctctgacacatgcagctcccggagacggtcacagcttgtctgtaagcggatgccgggagcagacaagcccgtcagggcgcgtcagcgggtgttggcgggtgtcggggctggcttaactatgcggcatcagagcagattgtactgagagtgcaccattcgacgctctcccttatgcgactcctgcattaggaagcagcccagtagtaggttgaggccgttgagcaccgccgccgcaaggaatggtctggcttatcgaaattaatacgactcactatagggagaccg

SEQ ID NO: 104 - DNA, 5726 bp, synthetic construct
  source 1..5726: mol_type = other DNA
gaattcgagctcgccccgttacataacttacggtaaatggcccgcctggctgaccgcccaacgacccccgcccattgacgtcaataatgacgtatgttcccatagtaacgccaatagggactttccattgacgtcaatgggtggagtatttacggtaaactgcccacttggcagtacatcaagtgtatcatatgccaagtacgccccctattgacgtcaatgacggtaaatggcccgcctggcattatgcccagtacatgaccttatgggactttcctacttggcagtacatctacgtattagtcatcgctattaccatggtgatgcggttttggcagtacatcaatgggcgtggatagcggtttgactcacggggatttccaagtctccaccccattgacgtcaatgggagtttgttttggcaccaaaatcaacgggactttccaaaatgtcgtaacaactccgccccattgacgcaaatgggcggtaggcgtgtacggtgggaggtctatataagcagagctcgtttagtgaaccgtcagatcgcctggagacgccatccacgctgttttgacctccatagaagacaccgggaccgatccagcctccgggggatcgatccccccgatcctgagaacttcagggtgagtttggggacccttgattgttctttctttttcgctattgtaaaattcatgttatatggagggggcaaagttttcagggtgttgtttagaatgggaagatgtcccttgtatcaccatggaccctcatgataattttgtttctttcactttctactctgttgacaaccattgtctcctcttattttcttttcattttctgtaactttttcgttaaactttagcttgcatttgtaacgaatttttaaattcacttttgtttatttgtcagattgtaagtactttctctaatcacttttttttcaaggcaatcagggtatattatattgtacttcagcacagttttagagaacaattgttataattaaatgataaggtagaatatttctgcatataaattctggctggcgtggaaatattcttattggtagaaacaactacatcctggtcatcatcctgcctttctctttatggttacaatgatatacactgtttgagatgaggataaaatactctgagtccaaaccgggcccctctgctaaccatgttcatgccttcttctttttcctacagctcctgggcaacgtgctggttattgtgctgtctcatcattttggcaaagaattgtaatacgactcactatagggcgaattcggatccacgcgtcactatggaaaccgatactctgctgctgtgggtgctgctgctgtgggtgccagggtcaaccggaggcgccatggtggatacactgtctggcctgagctctgagcagggccagtctggagatatgaccatcgaggaggactccgccacacacattaaattcagcaagagagacgaagatggcaaagagctggccggcgcgacaatggagctgagggacagcagcggaaagaccatctcaacctggatctccgacggccaggtgaaagatttttacctgtaccccggcaagtatacctttgtggagacagccgctccagacggctacgaagtggccacagccatcacctttaccgtgaatgagcagggccaggtgaccgtgaacggcaaggccacaaaaggcgacgcccacattggctccggaggcagcggcgaggtgcagctggtggagagcggcggcggcctggtgcagcccggcggcagcctgcgcctgagctgcgccgccagcggctacagcttcaccggctacaccatgaactgggtgcgccaggcccccggcaagggcctggagtgggtggccctgatcaacccctacaagggcgtgagcacctacaaccagaagttcaaggaccgcttcaccatcagcgtggacaagagcaagaacaccgcctacctgcagatgaacagcctgcgcgccgaggacaccgccgtgtactactgcgcccgcagcggctactacggcgacagcgactggtacttcgacgtgtggggccagggcaccctggtgaccgtgagcagcggcggcggcggcagcggcggcggcggcagcggcggcggcggcagcgacatccagatgacccagagccccagcagcctgagcgccagcgtgggcgaccgcgtgaccatcacctgccgcgccagccaggacatccgcaactacctgaactggtaccagcagaagcccggcaaggcccccaagctgctgatctactacaccagccgcctggagagcggcgtgcccagccgcttcagcggcagcggcagcggcaccgactacaccctgaccatcagcagcctgcagcccgaggacttcgccacctactactgccagcagggcaacaccctgccctggaccttcggccagggcaccaaggtggagatcaagggcagcggcggttccggcgactacaaggacgacgacgacaagtgagctagcctagtgtgaaatagacatcagaattaagaaaaacgtagggtccaagtggttccccgttatggactcgctatctgtcaaccagatcttataccctgaagttcacctagatagcccgatagttaccaataagatagtagccatcctggagtatgctcgactgtttaaacctgcaggcatgcaagctgatctttttccctctgccaaaaattatggggacatcatgaagccccttgagcatctgacttctggctaataaaggaaatttattttcattgcaatagtgtgttggaattttttgtgtctctcactcggaaggacatatgggagggcaaatcatttaaaacatcagaatgagtatttggtttagagtttggcaacatatgcccatatgctggctgccatgaacaaaggttggctataaagaggtcatcagtatatgaaacagccccctgctgtccattccttattccatagaaaagccttgacttgaggttagattttttttatattttgttttgtgttatttttttctttaacatccctaaaattttccttacatgttttactagccagatttttcctcctctcctgactactcccagtcatagctgtccctcttctcttatggagatccctcgaggagctttttgcaaaagcctaggcctccaaaaaagcctcttcactacttctggaatagctcagaggccgcggcctcggcctctgcataaataaaaaaaattagtcagccatggggcggagaatgggcggaactgggcggagttaggggcgggatgggcggagttaggggcgggactatggttgctgactaattgctgcattaatgaatcggccaacgcgcggggagaggcggtttgcgtattgggcgctcttccgcttcctcgctcactgactcgctgcgctcggtcgttcggctgcggcgagcggtatcagctcactcaaaggcggtaatacggttatccacagaatcaggggataacgcaggaaagaacatgtgagcaaaaggccagcaaaaggccaggaaccgtaaaaaggccgcgttgctggcgtttttccataggctccgcccccctgacgagcatcacaaaaatcgacgctcaagtcagaggtggcgaaacccgacaggactataaagataccaggcgtttccccctggaagctccctcgtgcgctctcctgttccgaccctgccgcttaccggatacctgtccgcctttctcccttcgggaagcgtggcgctttctcatagctcacgctgtaggtatctcagttcggtgtaggtcgttcgctccaagctgggctgtgtgcacgaaccccccgttcagcccgaccgctgcgccttatccggtaactatcgtcttgagtccaacccggtaagacacgacttatcgccactggcagcagccactggtaacaggattagcagagcgaggtatgtaggcggtgctacagagttcttgaagtggtggcctaactacggctacactagaagaacagtatttggtatctgcgctctgctgaagccagttaccttcggaaaaagagttggtagctcttgatccggcaaacaaaccaccgctggtagcggtggtttttttgtttgcaagcagcagattacgcgcagaaaaaaaggatctcaagaagatcctttgatcttttctacggggtctgacgctcagtggaacgaaaactcacgttaagggattttggtcatgagattatcaaaaaggatcttcacctagatccttttaaattaaaaatgaagttttaaatcaatctaaagtatatatgagtaaacttggtctgacagttaccaatgcttaatcagtgaggcacctatctcagcgatctgtctatttcgttcatccatagttgcctgactccccgtcgtgtagataactacgatacgggagggcttaccatctggccccagtgctgcaatgataccgcgagacccacgctcaccggctccagatttatcagcaataaaccagccagccggaagggccgagcgcagaagtggtcctgcaactttatccgcctccatccagtctattaattgttgccgggaagctagagtaagtagttcgccagttaatagtttgcgcaacgttgttgccattgctacaggcatcgtggtgtcacgctcgtcgtttggtatggcttcattcagctccggttcccaacgatcaaggcgagttacatgatcccccatgttgtgcaaaaaagcggttagctccttcggtcctccgatcgttgtcagaagtaagttggccgcagtgttatcactcatggttatggcagcactgcataattctcttactgtcatgccatccgtaagatgcttttctgtgactggtgagtactcaaccaagtcattctgagaatagtgtatgcggcgaccgagttgctcttgcccggcgtcaatacgggataataccgcgccacatagcagaactttaaaagtgctcatcattggaaaacgttcttcggggcgaaaactctcaaggatcttaccgctgttgagatccagttcgatgtaacccactcgtgcacccaactgatcttcagcatcttttactttcaccagcgtttctgggtgagcaaaaacaggaaggcaaaatgccgcaaaaaagggaataagggcgacacggaaatgttgaatactcatactcttcctttttcaatattattgaagcatttatcagggttattgtctcatgagcggatacatatttgaatgtatttagaaaaataaacaaataggggttccgcgcacatttccccgaaaagtgccacctgacgtctaagaaaccattattatcatgacattaacctataaaaataggcgtatcacgaggccctttcgtctcgcgcgtttcggtgatgacggtgaaaacctctgacacatgcagctcccggagacggtcacagcttgtctgtaagcggatgccgggagcagacaagcccgtcagggcgcgtcagcgggtgttggcgggtgtcggggctggcttaactatgcggcatcagagcagattgtactgagagtgcaccattcgacgctctcccttatgcgactcctgcattaggaagcagcccagtagtaggttgaggccgttgagcaccgccgccgcaaggaatggtctggcttatcgaaattaatacgactcactatagggagaccg

SEQ ID NO: 105 - DNA, 5726 bp, synthetic construct
  source 1..5726: mol_type = other DNA
gaattcgagctcgccccgttacataacttacggtaaatggcccgcctggctgaccgcccaacgacccccgcccattgacgtcaataatgacgtatgttcccatagtaacgccaatagggactttccattgacgtcaatgggtggagtatttacggtaaactgcccacttggcagtacatcaagtgtatcatatgccaagtacgccccctattgacgtcaatgacggtaaatggcccgcctggcattatgcccagtacatgaccttatgggactttcctacttggcagtacatctacgtattagtcatcgctattaccatggtgatgcggttttggcagtacatcaatgggcgtggatagcggtttgactcacggggatttccaagtctccaccccattgacgtcaatgggagtttgttttggcaccaaaatcaacgggactttccaaaatgtcgtaacaactccgccccattgacgcaaatgggcggtaggcgtgtacggtgggaggtctatataagcagagctcgtttagtgaaccgtcagatcgcctggagacgccatccacgctgttttgacctccatagaagacaccgggaccgatccagcctccgggggatcgatccccccgatcctgagaacttcagggtgagtttggggacccttgattgttctttctttttcgctattgtaaaattcatgttatatggagggggcaaagttttcagggtgttgtttagaatgggaagatgtcccttgtatcaccatggaccctcatgataattttgtttctttcactttctactctgttgacaaccattgtctcctcttattttcttttcattttctgtaactttttcgttaaactttagcttgcatttgtaacgaatttttaaattcacttttgtttatttgtcagattgtaagtactttctctaatcacttttttttcaaggcaatcagggtatattatattgtacttcagcacagttttagagaacaattgttataattaaatgataaggtagaatatttctgcatataaattctggctggcgtggaaatattcttattggtagaaacaactacatcctggtcatcatcctgcctttctctttatggttacaatgatatacactgtttgagatgaggataaaatactctgagtccaaaccgggcccctctgctaaccatgttcatgccttcttctttttcctacagctcctgggcaacgtgctggttattgtgctgtctcatcattttggcaaagaattgtaatacgactcactatagggcgaattcggatccacgcgtcactatggaaaccgatactctgctgctgtgggtgctgctgctgtgggtgccagggtcaaccggaggcgccatggtggatacactgtctggcctgagctctgagcagggccagtctggagatatgaccatcgaggaggactccgccacacacattaaattcagcaagagagacgaagatggcaaagagctggccggcgcgacaatggagctgagggacagcagcggaaagaccatctcaacctggatctccgacggccaggtgaaagatttttacctgtaccccggcaagtatacctttgtggagacagccgctccagacggctacgaagtggccacagccatcacctttaccgtgaatgagcagggccaggtgaccgtgaacggcaaggccacaaaaggcgacgcccacattggctccggaggcagcggcatggccgaggtgcaactgcagcagtctggggctgaactggtgaagcctggggcttcagtgaagttgtcctgcaaggcttccggctacaccttcaccagccactggatgcactgggtgaagcagagggctggacaaggccttgagtggatcggagagtttaatcccagcaacggccgtactaactacaatgagaaattcaagagcaaggccacactgactgtagacaaatcctccagcacagcctacatgcaactcagcagcctgacatctgaggactctgcggtctattactgtgccagtcgggactatgattacgacggacggtactttgactactggggccaagggaccacggtcaccgtctcttcaggtggcggtggctcgggcggtggtgggtcgggtggtggcggatctgacatcgagctcacccagtctccagcaatcatgtctgcatctccaggggagaaggtcactatgacctgcagtgccagctcaagtgtaacttacatgtattggtatcagcagaagccaggatcctcccccagactcctgatttatgacacatccaacctggcttctggagtccctgttcgtttcagtggcagtgggtctgggacctcttactctctcacaatcagccgaatggaggctgaagatgctgccacttattactgccagcagtggagtagtcacatattcacgttcggctcggggacagaactcgagatcaaaggcagcggcggttccggcgactacaaggacgacgacgacaagtgagctagcctagtgtgaaatagacatcagaattaagaaaaacgtagggtccaagtggttccccgttatggactcgctatctgtcaaccagatcttataccctgaagttcacctagatagcccgatagttaccaataagatagtagccatcctggagtatgctcgactgtttaaacctgcaggcatgcaagctgatctttttccctctgccaaaaattatggggacatcatgaagccccttgagcatctgacttctggctaataaaggaaatttattttcattgcaatagtgtgttggaattttttgtgtctctcactcggaaggacatatgggagggcaaatcatttaaaacatcagaatgagtatttggtttagagtttggcaacatatgcccatatgctggctgccatgaacaaaggttggctataaagaggtcatcagtatatgaaacagccccctgctgtccattccttattccatagaaaagccttgacttgaggttagattttttttatattttgttttgtgttatttttttctttaacatccctaaaattttccttacatgttttactagccagatttttcctcctctcctgactactcccagtcatagctgtccctcttctcttatggagatccctcgaggagctttttgcaaaagcctaggcctccaaaaaagcctcttcactacttctggaatagctcagaggccgcggcctcggcctctgcataaataaaaaaaattagtcagccatggggcggagaatgggcggaactgggcggagttaggggcgggatgggcggagttaggggcgggactatggttgctgactaattgctgcattaatgaatcggccaacgcgcggggagaggcggtttgcgtattgggcgctcttccgcttcctcgctcactgactcgctgcgctcggtcgttcggctgcggcgagcggtatcagctcactcaaaggcggtaatacggttatccacagaatcaggggataacgcaggaaagaacatgtgagcaaaaggccagcaaaaggccaggaaccgtaaaaaggccgcgttgctggcgtttttccataggctccgcccccctgacgagcatcacaaaaatcgacgctcaagtcagaggtggcgaaacccgacaggactataaagataccaggcgtttccccctggaagctccctcgtgcgctctcctgttccgaccctgccgcttaccggatacctgtccgcctttctcccttcgggaagcgtggcgctttctcatagctcacgctgtaggtatctcagttcggtgtaggtcgttcgctccaagctgggctgtgtgcacgaaccccccgttcagcccgaccgctgcgccttatccggtaactatcgtcttgagtccaacccggtaagacacgacttatcgccactggcagcagccactggtaacaggattagcagagcgaggtatgtaggcggtgctacagagttcttgaagtggtggcctaactacggctacactagaagaacagtatttggtatctgcgctctgctgaagccagttaccttcggaaaaagagttggtagctcttgatccggcaaacaaaccaccgctggtagcggtggtttttttgtttgcaagcagcagattacgcgcagaaaaaaaggatctcaagaagatcctttgatcttttctacggggtctgacgctcagtggaacgaaaactcacgttaagggattttggtcatgagattatcaaaaaggatcttcacctagatccttttaaattaaaaatgaagttttaaatcaatctaaagtatatatgagtaaacttggtctgacagttaccaatgcttaatcagtgaggcacctatctcagcgatctgtctatttcgttcatccatagttgcctgactccccgtcgtgtagataactacgatacgggagggcttaccatctggccccagtgctgcaatgataccgcgagacccacgctcaccggctccagatttatcagcaataaaccagccagccggaagggccgagcgcagaagtggtcctgcaactttatccgcctccatccagtctattaattgttgccgggaagctagagtaagtagttcgccagttaatagtttgcgcaacgttgttgccattgctacaggcatcgtggtgtcacgctcgtcgtttggtatggcttcattcagctccggttcccaacgatcaaggcgagttacatgatcccccatgttgtgcaaaaaagcggttagctccttcggtcctccgatcgttgtcagaagtaagttggccgcagtgttatcactcatggttatggcagcactgcataattctcttactgtcatgccatccgtaagatgcttttctgtgactggtgagtactcaaccaagtcattctgagaatagtgtatgcggcgaccgagttgctcttgcccggcgtcaatacgggataataccgcgccacatagcagaactttaaaagtgctcatcattggaaaacgttcttcggggcgaaaactctcaaggatcttaccgctgttgagatccagttcgatgtaacccactcgtgcacccaactgatcttcagcatcttttactttcaccagcgtttctgggtgagcaaaaacaggaaggcaaaatgccgcaaaaaagggaataagggcgacacggaaatgttgaatactcatactcttcctttttcaatattattgaagcatttatcagggttattgtctcatgagcggatacatatttgaatgtatttagaaaaataaacaaataggggttccgcgcacatttccccgaaaagtgccacctgacgtctaagaaaccattattatcatgacattaacctataaaaataggcgtatcacgaggccctttcgtctcgcgcgtttcggtgatgacggtgaaaacctctgacacatgcagctcccggagacggtcacagcttgtctgtaagcggatgccgggagcagacaagcccgtcagggcgcgtcagcgggtgttggcgggtgtcggggctggcttaactatgcggcatcagagcagattgtactgagagtgcaccattcgacgctctcccttatgcgactcctgcattaggaagcagcccagtagtaggttgaggccgttgagcaccgccgccgcaaggaatggtctggcttatcgaaattaatacgactcactatagggagaccg

SEQ ID NO: 106 - DNA, 5375 bp, synthetic construct
  source 1..5375: mol_type = other DNA
gaattcgagctcgccccgttacataacttacggtaaatggcccgcctggctgaccgcccaacgacccccgcccattgacgtcaataatgacgtatgttcccatagtaacgccaatagggactttccattgacgtcaatgggtggagtatttacggtaaactgcccacttggcagtacatcaagtgtatcatatgccaagtacgccccctattgacgtcaatgacggtaaatggcccgcctggcattatgcccagtacatgaccttatgggactttcctacttggcagtacatctacgtattagtcatcgctattaccatggtgatgcggttttggcagtacatcaatgggcgtggatagcggtttgactcacggggatttccaagtctccaccccattgacgtcaatgggagtttgttttggcaccaaaatcaacgggactttccaaaatgtcgtaacaactccgccccattgacgcaaatgggcggtaggcgtgtacggtgggaggtctatataagcagagctcgtttagtgaaccgtcagatcgcctggagacgccatccacgctgttttgacctccatagaagacaccgggaccgatccagcctccgggggatcgatccccccgatcctgagaacttcagggtgagtttggggacccttgattgttctttctttttcgctattgtaaaattcatgttatatggagggggcaaagttttcagggtgttgtttagaatgggaagatgtcccttgtatcaccatggaccctcatgataattttgtttctttcactttctactctgttgacaaccattgtctcctcttattttcttttcattttctgtaactttttcgttaaactttagcttgcatttgtaacgaatttttaaattcacttttgtttatttgtcagattgtaagtactttctctaatcacttttttttcaaggcaatcagggtatattatattgtacttcagcacagttttagagaacaattgttataattaaatgataaggtagaatatttctgcatataaattctggctggcgtggaaatattcttattggtagaaacaactacatcctggtcatcatcctgcctttctctttatggttacaatgatatacactgtttgagatgaggataaaatactctgagtccaaaccgggcccctctgctaaccatgttcatgccttcttctttttcctacagctcctgggcaacgtgctggttattgtgctgtctcatcattttggcaaagaattgtaatacgactcactatagggcgaattcggatccacgcgtcactatggaaaccgatactctgctgctgtgggtgctgctgctgtgggtgccagggtcaaccggaggcgccatggtggatacactgtctggcctgagctctgagcagggccagtctggagatatgaccatcgaggaggactccgccacacacattaaattcagcaagagagacgaagatggcaaagagctggccggcgcgacaatggagctgagggacagcagcggaaagaccatctcaacctggatctccgacggccaggtgaaagatttttacctgtaccccggcaagtatacctttgtggagacagccgctccagacggctacgaagtggccacagccatcacctttaccgtgaatgagcagggccaggtgaccgtgaacggcaaggccacaaaaggcgacgcccacattggctccggaggcagcggccaggtgaagctggaggagagcggcggcggcagcgtgcagaccggcggcagcctgcgcctgacctgcgccgccagtggccgcaccagccgcagctacggcatgggctggttccgccaggcccccggcaaggagcgcgagttcgtgagcggcatcagctggcgcggcgacagcaccggctacgccgacagcgtgaagggccgcttcaccatcagccgcgacaacgccaagaacaccgtggacctgcagatgaacagcctgaagcccgaggacaccgccatctactactgcgccgccgccgccggcagcgcctggtacggcaccctgtacgagtacgactactggggccagggcacccaggtgaccgtgagcagcgccctggagggcagcggcggttccggcgactacaaggacgacgacgacaagtgagctagcctagtgtgaaatagacatcagaattaagaaaaacgtagggtccaagtggttccccgttatggactcgctatctgtcaaccagatcttataccctgaagttcacctagatagcccgatagttaccaataagatagtagccatcctggagtatgctcgactgtttaaacctgcaggcatgcaagctgatctttttccctctgccaaaaattatggggacatcatgaagccccttgagcatctgacttctggctaataaaggaaatttattttcattgcaatagtgtgttggaattttttgtgtctctcactcggaaggacatatgggagggcaaatcatttaaaacatcagaatgagtatttggtttagagtttggcaacatatgcccatatgctggctgccatgaacaaaggttggctataaagaggtcatcagtatatgaaacagccccctgctgtccattccttattccatagaaaagccttgacttgaggttagattttttttatattttgttttgtgttatttttttctttaacatccctaaaattttccttacatgttttactagccagatttttcctcctctcctgactactcccagtcatagctgtccctcttctcttatggagatccctcgaggagctttttgcaaaagcctaggcctccaaaaaagcctcttcactacttctggaatagctcagaggccgcggcctcggcctctgcataaataaaaaaaattagtcagccatggggcggagaatgggcggaactgggcggagttaggggcgggatgggcggagttaggggcgggactatggttgctgactaattgctgcattaatgaatcggccaacgcgcggggagaggcggtttgcgtattgggcgctcttccgcttcctcgctcactgactcgctgcgctcggtcgttcggctgcggcgagcggtatcagctcactcaaaggcggtaatacggttatccacagaatcaggggataacgcaggaaagaacatgtgagcaaaaggccagcaaaaggccaggaaccgtaaaaaggccgcgttgctggcgtttttccataggctccgcccccctgacgagcatcacaaaaatcgacgctcaagtcagaggtggcgaaacccgacaggactataaagataccaggcgtttccccctggaagctccctcgtgcgctctcctgttccgaccctgccgcttaccggatacctgtccgcctttctcccttcgggaagcgtggcgctttctcatagctcacgctgtaggtatctcagttcggtgtaggtcgttcgctccaagctgggctgtgtgcacgaaccccccgttcagcccgaccgctgcgccttatccggtaactatcgtcttgagtccaacccggtaagacacgacttatcgccactggcagcagccactggtaacaggattagcagagcgaggtatgtaggcggtgctacagagttcttgaagtggtggcctaactacggctacactagaagaacagtatttggtatctgcgctctgctgaagccagttaccttcggaaaaagagttggtagctcttgatccggcaaacaaaccaccgctggtagcggtggtttttttgtttgcaagcagcagattacgcgcagaaaaaaaggatctcaagaagatcctttgatcttttctacggggtctgacgctcagtggaacgaaaactcacgttaagggattttggtcatgagattatcaaaaaggatcttcacctagatccttttaaattaaaaatgaagttttaaatcaatctaaagtatatatgagtaaacttggtctgacagttaccaatgcttaatcagtgaggcacctatctcagcgatctgtctatttcgttcatccatagttgcctgactccccgtcgtgtagataactacgatacgggagggcttaccatctggccccagtgctgcaatgataccgcgagacccacgctcaccggctccagatttatcagcaataaaccagccagccggaagggccgagcgcagaagtggtcctgcaactttatccgcctccatccagtctattaattgttgccgggaagctagagtaagtagttcgccagttaatagtttgcgcaacgttgttgccattgctacaggcatcgtggtgtcacgctcgtcgtttggtatggcttcattcagctccggttcccaacgatcaaggcgagttacatgatcccccatgttgtgcaaaaaagcggttagctccttcggtcctccgatcgttgtcagaagtaagttggccgcagtgttatcactcatggttatggcagcactgcataattctcttactgtcatgccatccgtaagatgcttttctgtgactggtgagtactcaaccaagtcattctgagaatagtgtatgcggcgaccgagttgctcttgcccggcgtcaatacgggataataccgcgccacatagcagaactttaaaagtgctcatcattggaaaacgttcttcggggcgaaaactctcaaggatcttaccgctgttgagatccagttcgatgtaacccactcgtgcacccaactgatcttcagcatcttttactttcaccagcgtttctgggtgagcaaaaacaggaaggcaaaatgccgcaaaaaagggaataagggcgacacggaaatgttgaatactcatactcttcctttttcaatattattgaagcatttatcagggttattgtctcatgagcggatacatatttgaatgtatttagaaaaataaacaaataggggttccgcgcacatttccccgaaaagtgccacctgacgtctaagaaaccattattatcatgacattaacctataaaaataggcgtatcacgaggccctttcgtctcgcgcgtttcggtgatgacggtgaaaacctctgacacatgcagctcccggagacggtcacagcttgtctgtaagcggatgccgggagcagacaagcccgtcagggcgcgtcagcgggtgttggcgggtgtcggggctggcttaactatgcggcatcagagcagattgtactgagagtgcaccattcgacgctctcccttatgcgactcctgcattaggaagcagcccagtagtaggttgaggccgttgagcaccgccgccgcaaggaatggtctggcttatcgaaattaatacgactcactatagggagaccg

SEQ ID NO: 107 - DNA, 5384 bp, synthetic construct
  source 1..5384: mol_type = other DNA
gaattcgagctcgccccgttacataacttacggtaaatggcccgcctggctgaccgcccaacgacccccgcccattgacgtcaataatgacgtatgttcccatagtaacgccaatagggactttccattgacgtcaatgggtggagtatttacggtaaactgcccacttggcagtacatcaagtgtatcatatgccaagtacgccccctattgacgtcaatgacggtaaatggcccgcctggcattatgcccagtacatgaccttatgggactttcctacttggcagtacatctacgtattagtcatcgctattaccatggtgatgcggttttggcagtacatcaatgggcgtggatagcggtttgactcacggggatttccaagtctccaccccattgacgtcaatgggagtttgttttggcaccaaaatcaacgggactttccaaaatgtcgtaacaactccgccccattgacgcaaatgggcggtaggcgtgtacggtgggaggtctatataagcagagctcgtttagtgaaccgtcagatcgcctggagacgccatccacgctgttttgacctccatagaagacaccgggaccgatccagcctccgggggatcgatccccccgatcctgagaacttcagggtgagtttggggacccttgattgttctttctttttcgctattgtaaaattcatgttatatggagggggcaaagttttcagggtgttgtttagaatgggaagatgtcccttgtatcaccatggaccctcatgataattttgtttctttcactttctactctgttgacaaccattgtctcctcttattttcttttcattttctgtaactttttcgttaaactttagcttgcatttgtaacgaatttttaaattcacttttgtttatttgtcagattgtaagtactttctctaatcacttttttttcaaggcaatcagggtatattatattgtacttcagcacagttttagagaacaattgttataattaaatgataaggtagaatatttctgcatataaattctggctggcgtggaaatattcttattggtagaaacaactacatcctggtcatcatcctgcctttctctttatggttacaatgatatacactgtttgagatgaggataaaatactctgagtccaaaccgggcccctctgctaaccatgttcatgccttcttctttttcctacagctcctgggcaacgtgctggttattgtgctgtctcatcattttggcaaagaattgtaatacgactcactatagggcgaattcggatccacgcgtcactatggaaaccgatactctgctgctgtgggtgctgctgctgtgggtgccagggtcaaccggaggcgccatggtggatacactgtctggcctgagctctgagcagggccagtctggagatatgaccatcgaggaggactccgccacacacattaaattcagcaagagagacgaagatggcaaagagctggccggcgcgacaatggagctgagggacagcagcggaaagaccatctcaacctggatctccgacggccaggtgaaagatttttacctgtaccccggcaagtatacctttgtggagacagccgctccagacggctacgaagtggccacagccatcacctttaccgtgaatgagcagggccaggtgaccgtgaacggcaaggccacaaaaggcgacgcccacattggctccggaggcagcggcgaggtgcagctggtggagagcggcggcggcctggtgcaggccggcggcagcctgcgcctgagctgcgccgccagtggccgcaccttcagcagctacgccatgggctggttccgccaggcccccggcaaggagcgcgagttcgtggtggccatcaactggagcagcggcagcacctactacgccgacagcgtgaagggccgcttcaccatcagccgcgacaacgccaagaacaccatgtacctgcagatgaacagcctgaagcccgaggacaccgccgtgtactactgcgccgccggctaccagatcaacagcggcaactacaacttcaaggactacgagtacgactactggggccagggcacccaggtgaccgtgagcagcgccctggagggcagcggcggttccggcgactacaaggacgacgacgacaagtgagctagcctagtgtgaaatagacatcagaattaagaaaaacgtagggtccaagtggttccccgttatggactcgctatctgtcaaccagatcttataccctgaagttcacctagatagcccgatagttaccaataagatagtagccatcctggagtatgctcgactgtttaaacctgcaggcatgcaagctgatctttttccctctgccaaaaattatggggacatcatgaagccccttgagcatctgacttctggctaataaaggaaatttattttcattgcaatagtgtgttggaattttttgtgtctctcactcggaaggacatatgggagggcaaatcatttaaaacatcagaatgagtatttggtttagagtttggcaacatatgcccatatgctggctgccatgaacaaaggttggctataaagaggtcatcagtatatgaaacagccccctgctgtccattccttattccatagaaaagccttgacttgaggttagattttttttatattttgttttgtgttatttttttctttaacatccctaaaattttccttacatgttttactagccagatttttcctcctctcctgactactcccagtcatagctgtccctcttctcttatggagatccctcgaggagctttttgcaaaagcctaggcctccaaaaaagcctcttcactacttctggaatagctcagaggccgcggcctcggcctctgcataaataaaaaaaattagtcagccatggggcggagaatgggcggaactgggcggagttaggggcgggatgggcggagttaggggcgggactatggttgctgactaattgctgcattaatgaatcggccaacgcgcggggagaggcggtttgcgtattgggcgctcttccgcttcctcgctcactgactcgctgcgctcggtcgttcggctgcggcgagcggtatcagctcactcaaaggcggtaatacggttatccacagaatcaggggataacgcaggaaagaacatgtgagcaaaaggccagcaaaaggccaggaaccgtaaaaaggccgcgttgctggcgtttttccataggctccgcccccctgacgagcatcacaaaaatcgacgctcaagtcagaggtggcgaaacccgacaggactataaagataccaggcgtttccccctggaagctccctcgtgcgctctcctgttccgaccctgccgcttaccggatacctgtccgcctttctcccttcgggaagcgtggcgctttctcatagctcacgctgtaggtatctcagttcggtgtaggtcgttcgctccaagctgggctgtgtgcacgaaccccccgttcagcccgaccgctgcgccttatccggtaactatcgtcttgagtccaacccggtaagacacgacttatcgccactggcagcagccactggtaacaggattagcagagcgaggtatgtaggcggtgctacagagttcttgaagtggtggcctaactacggctacactagaagaacagtatttggtatctgcgctctgctgaagccagttaccttcggaaaaagagttggtagctcttgatccggcaaacaaaccaccgctggtagcggtggtttttttgtttgcaagcagcagattacgcgcagaaaaaaaggatctcaagaagatcctttgatcttttctacggggtctgacgctcagtggaacgaaaactcacgttaagggattttggtcatgagattatcaaaaaggatcttcacctagatccttttaaattaaaaatgaagttttaaatcaatctaaagtatatatgagtaaacttggtctgacagttaccaatgcttaatcagtgaggcacctatctcagcgatctgtctatttcgttcatccatagttgcctgactccccgtcgtgtagataactacgatacgggagggcttaccatctggccccagtgctgcaatgataccgcgagacccacgctcaccggctccagatttatcagcaataaaccagccagccggaagggccgagcgcagaagtggtcctgcaactttatccgcctccatccagtctattaattgttgccgggaagctagagtaagtagttcgccagttaatagtttgcgcaacgttgttgccattgctacaggcatcgtggtgtcacgctcgtcgtttggtatggcttcattcagctccggttcccaacgatcaaggcgagttacatgatcccccatgttgtgcaaaaaagcggttagctccttcggtcctccgatcgttgtcagaagtaagttggccgcagtgttatcactcatggttatggcagcactgcataattctcttactgtcatgccatccgtaagatgcttttctgtgactggtgagtactcaaccaagtcattctgagaatagtgtatgcggcgaccgagttgctcttgcccggcgtcaatacgggataataccgcgccacatagcagaactttaaaagtgctcatcattggaaaacgttcttcggggcgaaaactctcaaggatcttaccgctgttgagatccagttcgatgtaacccactcgtgcacccaactgatcttcagcatcttttactttcaccagcgtttctgggtgagcaaaaacaggaaggcaaaatgccgcaaaaaagggaataagggcgacacggaaatgttgaatactcatactcttcctttttcaatattattgaagcatttatcagggttattgtctcatgagcggatacatatttgaatgtatttagaaaaataaacaaataggggttccgcgcacatttccccgaaaagtgccacctgacgtctaagaaaccattattatcatgacattaacctataaaaataggcgtatcacgaggccctttcgtctcgcgcgtttcggtgatgacggtgaaaacctctgacacatgcagctcccggagacggtcacagcttgtctgtaagcggatgccgggagcagacaagcccgtcagggcgcgtcagcgggtgttggcgggtgtcggggctggcttaactatgcggcatcagagcagattgtactgagagtgcaccattcgacgctctcccttatgcgactcctgcattaggaagcagcccagtagtaggttgaggccgttgagcaccgccgccgcaaggaatggtctggcttatcgaaattaatacgactcactatagggagaccg

SEQ ID NO: 108 - DNA, 5075 bp, synthetic construct
  source 1..5075: mol_type = other DNA
gaattcgagctcgccccgttacataacttacggtaaatggcccgcctggctgaccgcccaacgacccccgcccattgacgtcaataatgacgtatgttcccatagtaacgccaatagggactttccattgacgtcaatgggtggagtatttacggtaaactgcccacttggcagtacatcaagtgtatcatatgccaagtacgccccctattgacgtcaatgacggtaaatggcccgcctggcattatgcccagtacatgaccttatgggactttcctacttggcagtacatctacgtattagtcatcgctattaccatggtgatgcggttttggcagtacatcaatgggcgtggatagcggtttgactcacggggatttccaagtctccaccccattgacgtcaatgggagtttgttttggcaccaaaatcaacgggactttccaaaatgtcgtaacaactccgccccattgacgcaaatgggcggtaggcgtgtacggtgggaggtctatataagcagagctcgtttagtgaaccgtcagatcgcctggagacgccatccacgctgttttgacctccatagaagacaccgggaccgatccagcctccgggggatcgatccccccgatcctgagaacttcagggtgagtttggggacccttgattgttctttctttttcgctattgtaaaattcatgttatatggagggggcaaagttttcagggtgttgtttagaatgggaagatgtcccttgtatcaccatggaccctcatgataattttgtttctttcactttctactctgttgacaaccattgtctcctcttattttcttttcattttctgtaactttttcgttaaactttagcttgcatttgtaacgaatttttaaattcacttttgtttatttgtcagattgtaagtactttctctaatcacttttttttcaaggcaatcagggtatattatattgtacttcagcacagttttagagaacaattgttataattaaatgataaggtagaatatttctgcatataaattctggctggcgtggaaatattcttattggtagaaacaactacatcctggtcatcatcctgcctttctctttatggttacaatgatatacactgtttgagatgaggataaaatactctgagtccaaaccgggcccctctgctaaccatgttcatgccttcttctttttcctacagctcctgggcaacgtgctggttattgtgctgtctcatcattttggcaaagaattgtaatacgactcactatagggcgaattcggatccacgcgtcactatggaaaccgatactctgctgctgtgggtgctgctgctgtgggtgccagggtcaaccggaggcgccatggtggatacactgtctggcctgagctctgagcagggccagtctggagatatgaccatcgaggaggactccgccacacacattaaattcagcaagagagacgaagatggcaaagagctggccggcgcgacaatggagctgagggacagcagcggaaagaccatctcaacctggatctccgacggccaggtgaaagatttttacctgtaccccggcaagtatacctttgtggagacagccgctccagacggctacgaagtggccacagccatcacctttaccgtgaatgagcagggccaggtgaccgtgaacggcaaggccacaaaaggcgacgcccacattggctccggaggcagcggcaacaagttcaacaagggcatgcgcggctactggggcgccctgggcggcggcaacggcaagcgcggcatcatgggctacgacggcagcggcggttccggcgactacaaggacgacgacgacaagtgagctagcctagtgtgaaatagacatcagaattaagaaaaacgtagggtccaagtggttccccgttatggactcgctatctgtcaaccagatcttataccctgaagttcacctagatagcccgatagttaccaataagatagtagccatcctggagtatgctcgactgtttaaacctgcaggcatgcaagctgatctttttccctctgccaaaaattatggggacatcatgaagccccttgagcatctgacttctggctaataaaggaaatttattttcattgcaatagtgtgttggaattttttgtgtctctcactcggaaggacatatgggagggcaaatcatttaaaacatcagaatgagtatttggtttagagtttggcaacatatgcccatatgctggctgccatgaacaaaggttggctataaagaggtcatcagtatatgaaacagccccctgctgtccattccttattccatagaaaagccttgacttgaggttagattttttttatattttgttttgtgttatttttttctttaacatccctaaaattttccttacatgttttactagccagatttttcctcctctcctgactactcccagtcatagctgtccctcttctcttatggagatccctcgaggagctttttgcaaaagcctaggcctccaaaaaagcctcttcactacttctggaatagctcagaggccgcggcctcggcctctgcataaataaaaaaaattagtcagccatggggcggagaatgggcggaactgggcggagttaggggcgggatgggcggagttaggggcgggactatggttgctgactaattgctgcattaatgaatcggccaacgcgcggggagaggcggtttgcgtattgggcgctcttccgcttcctcgctcactgactcgctgcgctcggtcgttcggctgcggcgagcggtatcagctcactcaaaggcggtaatacggttatccacagaatcaggggataacgcaggaaagaacatgtgagcaaaaggccagcaaaaggccaggaaccgtaaaaaggccgcgttgctggcgtttttccataggctccgcccccctgacgagcatcacaaaaatcgacgctcaagtcagaggtggcgaaacccgacaggactataaagataccaggcgtttccccctggaagctccctcgtgcgctctcctgttccgaccctgccgcttaccggatacctgtccgcctttctcccttcgggaagcgtggcgctttctcatagctcacgctgtaggtatctcagttcggtgtaggtcgttcgctccaagctgggctgtgtgcacgaaccccccgttcagcccgaccgctgcgccttatccggtaactatcgtcttgagtccaacccggtaagacacgacttatcgccactggcagcagccactggtaacaggattagcagagcgaggtatgtaggcggtgctacagagttcttgaagtggtggcctaactacggctacactagaagaacagtatttggtatctgcgctctgctgaagccagttaccttcggaaaaagagttggtagctcttgatccggcaaacaaaccaccgctggtagcggtggtttttttgtttgcaagcagcagattacgcgcagaaaaaaaggatctcaagaagatcctttgatcttttctacggggtctgacgctcagtggaacgaaaactcacgttaagggattttggtcatgagattatcaaaaaggatcttcacctagatccttttaaattaaaaatgaagttttaaatcaatctaaagtatatatgagtaaacttggtctgacagttaccaatgcttaatcagtgaggcacctatctcagcgatctgtctatttcgttcatccatagttgcctgactccccgtcgtgtagataactacgatacgggagggcttaccatctggccccagtgctgcaatgataccgcgagacccacgctcaccggctccagatttatcagcaataaaccagccagccggaagggccgagcgcagaagtggtcctgcaactttatccgcctccatccagtctattaattgttgccgggaagctagagtaagtagttcgccagttaatagtttgcgcaacgttgttgccattgctacaggcatcgtggtgtcacgctcgtcgtttggtatggcttcattcagctccggttcccaacgatcaaggcgagttacatgatcccccatgttgtgcaaaaaagcggttagctccttcggtcctccgatcgttgtcagaagtaagttggccgcagtgttatcactcatggttatggcagcactgcataattctcttactgtcatgccatccgtaagatgcttttctgtgactggtgagtactcaaccaagtcattctgagaatagtgtatgcggcgaccgagttgctcttgcccggcgtcaatacgggataataccgcgccacatagcagaactttaaaagtgctcatcattggaaaacgttcttcggggcgaaaactctcaaggatcttaccgctgttgagatccagttcgatgtaacccactcgtgcacccaactgatcttcagcatcttttactttcaccagcgtttctgggtgagcaaaaacaggaaggcaaaatgccgcaaaaaagggaataagggcgacacggaaatgttgaatactcatactcttcctttttcaatattattgaagcatttatcagggttattgtctcatgagcggatacatatttgaatgtatttagaaaaataaacaaataggggttccgcgcacatttccccgaaaagtgccacctgacgtctaagaaaccattattatcatgacattaacctataaaaataggcgtatcacgaggccctttcgtctcgcgcgtttcggtgatgacggtgaaaacctctgacacatgcagctcccggagacggtcacagcttgtctgtaagcggatgccgggagcagacaagcccgtcagggcgcgtcagcgggtgttggcgggtgtcggggctggcttaactatgcggcatcagagcagattgtactgagagtgcaccattcgacgctctcccttatgcgactcctgcattaggaagcagcccagtagtaggttgaggccgttgagcaccgccgccgcaaggaatggtctggcttatcgaaattaatacgactcactatagggagaccg

SEQ ID NO: 109 - DNA, 5759 bp, synthetic construct
  source 1..5759: mol_type = other DNA
gaattcgagctcgccccgttacataacttacggtaaatggcccgcctggctgaccgcccaacgacccccgcccattgacgtcaataatgacgtatgttcccatagtaacgccaatagggactttccattgacgtcaatgggtggagtatttacggtaaactgcccacttggcagtacatcaagtgtatcatatgccaagtacgccccctattgacgtcaatgacggtaaatggcccgcctggcattatgcccagtacatgaccttatgggactttcctacttggcagtacatctacgtattagtcatcgctattaccatggtgatgcggttttggcagtacatcaatgggcgtggatagcggtttgactcacggggatttccaagtctccaccccattgacgtcaatgggagtttgttttggcaccaaaatcaacgggactttccaaaatgtcgtaacaactccgccccattgacgcaaatgggcggtaggcgtgtacggtgggaggtctatataagcagagctcgtttagtgaaccgtcagatcgcctggagacgccatccacgctgttttgacctccatagaagacaccgggaccgatccagcctccgggggatcgatccccccgatcctgagaacttcagggtgagtttggggacccttgattgttctttctttttcgctattgtaaaattcatgttatatggagggggcaaagttttcagggtgttgtttagaatgggaagatgtcccttgtatcaccatggaccctcatgataattttgtttctttcactttctactctgttgacaaccattgtctcctcttattttcttttcattttctgtaactttttcgttaaactttagcttgcatttgtaacgaatttttaaattcacttttgtttatttgtcagattgtaagtactttctctaatcacttttttttcaaggcaatcagggtatattatattgtacttcagcacagttttagagaacaattgttataattaaatgataaggtagaatatttctgcatataaattctggctggcgtggaaatattcttattggtagaaacaactacatcctggtcatcatcctgcctttctctttatggttacaatgatatacactgtttgagatgaggataaaatactctgagtccaaaccgggcccctctgctaaccatgttcatgccttcttctttttcctacagctcctgggcaacgtgctggttattgtgctgtctcatcattttggcaaagaattgtaatacgactcactatagggcgaattcggatccacgcgtcactatggaaaccgatactctgctgctgtgggtgctgctgctgtgggtgccagggtcaaccggaggcgccatggtggatacactgtctggcctgagctctgagcagggccagtctggagatatgaccatcgaggaggactccgccacacacattaaattcagcaagagagacgaagatggcaaagagctggccggcgcgacaatggagctgagggacagcagcggaaagaccatctcaacctggatctccgacggccaggtgaaagatttttacctgtaccccggcaagtatacctttgtggagacagccgctccagacggctacgaagtggccacagccatcacctttaccgtgaatgagcagggccaggtgaccgtgaacggcaaggccacaaaaggcgacgcccacattggctccggaggcagcggccaggtgcagctggtgcagtctggggcagaggtgaaaaagcccggggagtctctgaagatctcctgtaagggttctggatacagctttaccagctactggatcgcctgggtgcgccagatgcccgggaaaggcctggagtacatggggctcatctatcctggtgactctgacaccaaatacagcccgtccttccaaggccaggtcaccatctcagtcgacaagtccgtcagcactgcctacttgcaatggagcagtctgaagccctcggacagcgccgtgtatttttgtgcgagacatgacgtgggatattgcaccgaccggacttgcgcaaagtggcctgaatggctgggcgtatggggccagggcaccctggtcaccgtctcctcaggtggaggcggttcaggcggaggtggctctggcggtggcggatcgcagtctgtgttgacgcagccgccctcagtgtctgcggccccaggacagaaggtcaccatctcctgctctggaagcagctccaacattgggaataattatgtatcctggtaccagcagctcccaggaacagcccccaaactcctcatctatgatcacaccaatcggcccgcaggggtccctgaccgattctctggctccaagtctggcacctcagcctccctggccatcagtgggttccggtccgaggatgaggctgattattactgtgcctcctgggactacaccctctcgggctgggtgttcggcggagggaccaaggtcaccgtcctaggtggcagcggcggttccggcgactacaaggacgacgacgacaagtgagctagcctagtgtgaaatagacatcagaattaagaaaaacgtagggtccaagtggttccccgttatggactcgctatctgtcaaccagatcttataccctgaagttcacctagatagcccgatagttaccaataagatagtagccatcctggagtatgctcgactgtttaaacctgcaggcatgcaagctgatctttttccctctgccaaaaattatggggacatcatgaagccccttgagcatctgacttctggctaataaaggaaatttattttcattgcaatagtgtgttggaattttttgtgtctctcactcggaaggacatatgggagggcaaatcatttaaaacatcagaatgagtatttggtttagagtttggcaacatatgcccatatgctggctgccatgaacaaaggttggctataaagaggtcatcagtatatgaaacagccccctgctgtccattccttattccatagaaaagccttgacttgaggttagattttttttatattttgttttgtgttatttttttctttaacatccctaaaattttccttacatgttttactagccagatttttcctcctctcctgactactcccagtcatagctgtccctcttctcttatggagatccctcgaggagctttttgcaaaagcctaggcctccaaaaaagcctcttcactacttctggaatagctcagaggccgcggcctcggcctctgcataaataaaaaaaattagtcagccatggggcggagaatgggcggaactgggcggagttaggggcgggatgggcggagttaggggcgggactatggttgctgactaattgctgcattaatgaatcggccaacgcgcggggagaggcggtttgcgtattgggcgctcttccgcttcctcgctcactgactcgctgcgctcggtcgttcggctgcggcgagcggtatcagctcactcaaaggcggtaatacggttatccacagaatcaggggataacgcaggaaagaacatgtgagcaaaaggccagcaaaaggccaggaaccgtaaaaaggccgcgttgctggcgtttttccataggctccgcccccctgacgagcatcacaaaaatcgacgctcaagtcagaggtggcgaaacccgacaggactataaagataccaggcgtttccccctggaagctccctcgtgcgctctcctgttccgaccctgccgcttaccggatacctgtccgcctttctcccttcgggaagcgtggcgctttctcatagctcacgctgtaggtatctcagttcggtgtaggtcgttcgctccaagctgggctgtgtgcacgaaccccccgttcagcccgaccgctgcgccttatccggtaactatcgtcttgagtccaacccggtaagacacgacttatcgccactggcagcagccactggtaacaggattagcagagcgaggtatgtaggcggtgctacagagttcttgaagtggtggcctaactacggctacactagaagaacagtatttggtatctgcgctctgctgaagccagttaccttcggaaaaagagttggtagctcttgatccggcaaacaaaccaccgctggtagcggtggtttttttgtttgcaagcagcagattacgcgcagaaaaaaaggatctcaagaagatcctttgatcttttctacggggtctgacgctcagtggaacgaaaactcacgttaagggattttggtcatgagattatcaaaaaggatcttcacctagatccttttaaattaaaaatgaagttttaaatcaatctaaagtatatatgagtaaacttggtctgacagttaccaatgcttaatcagtgaggcacctatctcagcgatctgtctatttcgttcatccatagttgcctgactccccgtcgtgtagataactacgatacgggagggcttaccatctggccccagtgctgcaatgataccgcgagacccacgctcaccggctccagatttatcagcaataaaccagccagccggaagggccgagcgcagaagtggtcctgcaactttatccgcctccatccagtctattaattgttgccgggaagctagagtaagtagttcgccagttaatagtttgcgcaacgttgttgccattgctacaggcatcgtggtgtcacgctcgtcgtttggtatggcttcattcagctccggttcccaacgatcaaggcgagttacatgatcccccatgttgtgcaaaaaagcggttagctccttcggtcctccgatcgttgtcagaagtaagttggccgcagtgttatcactcatggttatggcagcactgcataattctcttactgtcatgccatccgtaagatgcttttctgtgactggtgagtactcaaccaagtcattctgagaatagtgtatgcggcgaccgagttgctcttgcccggcgtcaatacgggataataccgcgccacatagcagaactttaaaagtgctcatcattggaaaacgttcttcggggcgaaaactctcaaggatcttaccgctgttgagatccagttcgatgtaacccactcgtgcacccaactgatcttcagcatcttttactttcaccagcgtttctgggtgagcaaaaacaggaaggcaaaatgccgcaaaaaagggaataagggcgacacggaaatgttgaatactcatactcttcctttttcaatattattgaagcatttatcagggttattgtctcatgagcggatacatatttgaatgtatttagaaaaataaacaaataggggttccgcgcacatttccccgaaaagtgccacctgacgtctaagaaaccattattatcatgacattaacctataaaaataggcgtatcacgaggccctttcgtctcgcgcgtttcggtgatgacggtgaaaacctctgacacatgcagctcccggagacggtcacagcttgtctgtaagcggatgccgggagcagacaagcccgtcagggcgcgtcagcgggtgttggcgggtgtcggggctggcttaactatgcggcatcagagcagattgtactgagagtgcaccattcgacgctctcccttatgcgactcctgcattaggaagcagcccagtagtaggttgaggccgttgagcaccgccgccgcaaggaatggtctggcttatcgaaattaatacgactcactatagggagaccg

SEQ ID NO: 110 - DNA, 5489 bp, synthetic construct
  source 1..5489: mol_type = other DNA
gaattcgagctcgccccgttacataacttacggtaaatggcccgcctggctgaccgcccaacgacccccgcccattgacgtcaataatgacgtatgttcccatagtaacgccaatagggactttccattgacgtcaatgggtggagtatttacggtaaactgcccacttggcagtacatcaagtgtatcatatgccaagtacgccccctattgacgtcaatgacggtaaatggcccgcctggcattatgcccagtacatgaccttatgggactttcctacttggcagtacatctacgtattagtcatcgctattaccatggtgatgcggttttggcagtacatcaatgggcgtggatagcggtttgactcacggggatttccaagtctccaccccattgacgtcaatgggagtttgttttggcaccaaaatcaacgggactttccaaaatgtcgtaacaactccgccccattgacgcaaatgggcggtaggcgtgtacggtgggaggtctatataagcagagctcgtttagtgaaccgtcagatcgcctggagacgccatccacgctgttttgacctccatagaagacaccgggaccgatccagcctccgggggatcgatccccccgatcctgagaacttcagggtgagtttggggacccttgattgttctttctttttcgctattgtaaaattcatgttatatggagggggcaaagttttcagggtgttgtttagaatgggaagatgtcccttgtatcaccatggaccctcatgataattttgtttctttcactttctactctgttgacaaccattgtctcctcttattttcttttcattttctgtaactttttcgttaaactttagcttgcatttgtaacgaatttttaaattcacttttgtttatttgtcagattgtaagtactttctctaatcacttttttttcaaggcaatcagggtatattatattgtacttcagcacagttttagagaacaattgttataattaaatgataaggtagaatatttctgcatataaattctggctggcgtggaaatattcttattggtagaaacaactacatcctggtcatcatcctgcctttctctttatggttacaatgatatacactgtttgagatgaggataaaatactctgagtccaaaccgggcccctctgctaaccatgttcatgccttcttctttttcctacagctcctgggcaacgtgctggttattgtgctgtctcatcattttggcaaagaattgtaatacgactcactatagggcgaattcggatccacgcgtcactatggaaaccgatactctgctgctgtgggtgctgctgctgtgggtgccagggtcaaccggaggcgccatggtggatacactgtctggcctgagctctgagcagggccagtctggagatatgaccatcgaggaggactccgccacacacattaaattcagcaagagagacgaagatggcaaagagctggccggcgcgacaatggagctgagggacagcagcggaaagaccatctcaacctggatctccgacggccaggtgaaagatttttacctgtaccccggcaagtatacctttgtggagacagccgctccagacggctacgaagtggccacagccatcacctttaccgtgaatgagcagggccaggtgaccgtgaacggcaaggccacaaaaggcgacgcccacattggctccggaggcagcggcgagggcatctgccgcaaccgcgtgaccaacaacgtgaaggacgtgaccaagctggtggccaacctgcccaaggactacatgatcaccctgaagtacgtgcccggcatggacgtgctgcccagccactgctggatcagcgagatggtggtgcagctgtcggacagcctgaccgacctgctggacaagttcagcaacatcagcgagggcctgagcaactacagcatcatcgacaagctggtgaacatcgtggacgacctggtggagtgcgtgaaggagaacagcagcaaggacctgaagaagagcttcaagagccccgagccccgcctgttcacccccgaggagttcttccgcatcttcaaccgcagcatcgacgccttcaaggacttcgtggtggccagcgagaccagcgactgcgtggtgagcagcaccctgagccccgagaaggacagccgcgtgagcgtgaccaagcccttcatgctgccccccgtggccgccggcagcggcggttccggcgactacaaggacgacgacgacaagtgagctagcctagtgtgaaatagacatcagaattaagaaaaacgtagggtccaagtggttccccgttatggactcgctatctgtcaaccagatcttataccctgaagttcacctagatagcccgatagttaccaataagatagtagccatcctggagtatgctcgactgtttaaacctgcaggcatgcaagctgatctttttccctctgccaaaaattatggggacatcatgaagccccttgagcatctgacttctggctaataaaggaaatttattttcattgcaatagtgtgttggaattttttgtgtctctcactcggaaggacatatgggagggcaaatcatttaaaacatcagaatgagtatttggtttagagtttggcaacatatgcccatatgctggctgccatgaacaaaggttggctataaagaggtcatcagtatatgaaacagccccctgctgtccattccttattccatagaaaagccttgacttgaggttagattttttttatattttgttttgtgttatttttttctttaacatccctaaaattttccttacatgttttactagccagatttttcctcctctcctgactactcccagtcatagctgtccctcttctcttatggagatccctcgaggagctttttgcaaaagcctaggcctccaaaaaagcctcttcactacttctggaatagctcagaggccgcggcctcggcctctgcataaataaaaaaaattagtcagccatggggcggagaatgggcggaactgggcggagttaggggcgggatgggcggagttaggggcgggactatggttgctgactaattgctgcattaatgaatcggccaacgcgcggggagaggcggtttgcgtattgggcgctcttccgcttcctcgctcactgactcgctgcgctcggtcgttcggctgcggcgagcggtatcagctcactcaaaggcggtaatacggttatccacagaatcaggggataacgcaggaaagaacatgtgagcaaaaggccagcaaaaggccaggaaccgtaaaaaggccgcgttgctggcgtttttccataggctccgcccccctgacgagcatcacaaaaatcgacgctcaagtcagaggtggcgaaacccgacaggactataaagataccaggcgtttccccctggaagctccctcgtgcgctctcctgttccgaccctgccgcttaccggatacctgtccgcctttctcccttcgggaagcgtggcgctttctcatagctcacgctgtaggtatctcagttcggtgtaggtcgttcgctccaagctgggctgtgtgcacgaaccccccgttcagcccgaccgctgcgccttatccggtaactatcgtcttgagtccaacccggtaagacacgacttatcgccactggcagcagccactggtaacaggattagcagagcgaggtatgtaggcggtgctacagagttcttgaagtggtggcctaactacggctacactagaagaacagtatttggtatctgcgctctgctgaagccagttaccttcggaaaaagagttggtagctcttgatccggcaaacaaaccaccgctggtagcggtggtttttttgtttgcaagcagcagattacgcgcagaaaaaaaggatctcaagaagatcctttgatcttttctacggggtctgacgctcagtggaacgaaaactcacgttaagggattttggtcatgagattatcaaaaaggatcttcacctagatccttttaaattaaaaatgaagttttaaatcaatctaaagtatatatgagtaaacttggtctgacagttaccaatgcttaatcagtgaggcacctatctcagcgatctgtctatttcgttcatccatagttgcctgactccccgtcgtgtagataactacgatacgggagggcttaccatctggccccagtgctgcaatgataccgcgagacccacgctcaccggctccagatttatcagcaataaaccagccagccggaagggccgagcgcagaagtggtcctgcaactttatccgcctccatccagtctattaattgttgccgggaagctagagtaagtagttcgccagttaatagtttgcgcaacgttgttgccattgctacaggcatcgtggtgtcacgctcgtcgtttggtatggcttcattcagctccggttcccaacgatcaaggcgagttacatgatcccccatgttgtgcaaaaaagcggttagctccttcggtcctccgatcgttgtcagaagtaagttggccgcagtgttatcactcatggttatggcagcactgcataattctcttactgtcatgccatccgtaagatgcttttctgtgactggtgagtactcaaccaagtcattctgagaatagtgtatgcggcgaccgagttgctcttgcccggcgtcaatacgggataataccgcgccacatagcagaactttaaaagtgctcatcattggaaaacgttcttcggggcgaaaactctcaaggatcttaccgctgttgagatccagttcgatgtaacccactcgtgcacccaactgatcttcagcatcttttactttcaccagcgtttctgggtgagcaaaaacaggaaggcaaaatgccgcaaaaaagggaataagggcgacacggaaatgttgaatactcatactcttcctttttcaatattattgaagcatttatcagggttattgtctcatgagcggatacatatttgaatgtatttagaaaaataaacaaataggggttccgcgcacatttccccgaaaagtgccacctgacgtctaagaaaccattattatcatgacattaacctataaaaataggcgtatcacgaggccctttcgtctcgcgcgtttcggtgatgacggtgaaaacctctgacacatgcagctcccggagacggtcacagcttgtctgtaagcggatgccgggagcagacaagcccgtcagggcgcgtcagcgggtgttggcgggtgtcggggctggcttaactatgcggcatcagagcagattgtactgagagtgcaccattcgacgctctcccttatgcgactcctgcattaggaagcagcccagtagtaggttgaggccgttgagcaccgccgccgcaaggaatggtctggcttatcgaaattaatacgactcactatagggagaccg

SEQ ID NO: 111 - DNA, 5738 bp, synthetic construct; identical to SEQ ID NO: 99
  source 1..5738: mol_type = other DNA

SEQ ID NO: 112 - DNA, 5999 bp, synthetic construct
  source 1..5999: mol_type = other DNA
gaattcgagctcgccccgttacataacttacggtaaatggcccgcctggctgaccgcccaacgacccccgcccattgacgtcaataatgacgtatgttcccatagtaacgccaatagggactttccattgacgtcaatgggtggagtatttacggtaaactgcccacttggcagtacatcaagtgtatcatatgccaagtacgccccctattgacgtcaatgacggtaaatggcccgcctggcattatgcccagtacatgaccttatgggactttcctacttggcagtacatctacgtattagtcatcgctattaccatggtgatgcggttttggcagtacatcaatgggcgtggatagcggtttgactcacggggatttccaagtctccaccccattgacgtcaatgggagtttgttttggcaccaaaatcaacgggactttccaaaatgtcgtaacaactccgccccattgacgcaaatgggcggtaggcgtgtacggtgggaggtctatataagcagagctcgtttagtgaaccgtcagatcgcctggagacgccatccacgctgttttgacctccatagaagacaccgggaccgatccagcctccgggggatcgatccccccgatcctgagaacttcagggtgagtttggggacccttgattgttctttctttttcgctattgtaaaattcatgttatatggagggggcaaagttttcagggtgttgtttagaatgggaagatgtcccttgtatcaccatggaccctcatgataattttgtttctttcactttctactctgttgacaaccattgtctcctcttattttcttttcattttctgtaactttttcgttaaactttagcttgcatttgtaacgaatttttaaattcacttttgtttatttgtcagattgtaagtactttctctaatcacttttttttcaaggcaatcagggtatattatattgtacttcagcacagttttagagaacaattgttataattaaatgataaggtagaatatttctgcatataaattctggctggcgtggaaatattcttattggtagaaacaactacatcctggtcatcatcctgcctttctctttatggttacaatgatatacactgtttgagatgaggataaaatactctgagtccaaaccgggcccctctgctaaccatgttcatgccttcttctttttcctacagctcctgggcaacgtgctggttattgtgctgtctcatcattttggcaaagaattgtaatacgactcactatagggcgaattcggatccacgcgtcactatggaaaccgatactctgctgctgtgggtgctgctgctgtgggtgccagggtcaaccggaggcgccatggtggatacactgtctggcctgagctctgagcagggccagtctggagatatgaccatcgaggaggactccgccacacacattaaattcagcaagagagacgaagatggcaaagagctggccggcgcgacaatggagctgagggacagcagcggaaagaccatctcaacctggatctccgacggccaggtgaaagatttttacctgtaccccggcaagtatacctttgtggagacagccgctccagacggctacgaagtggccacagccatcacctttaccgtgaatgagcagggccaggtgaccgtgaacggcaaggccacaaaaggcgacgcccacattggctccggaggcagcggctcccccgtggctcccgcatgtgatccaagactgctgaacaaactgctgcgcgactctcatctgctgcactcaaggctgtctcagtgtccagatgtggaccctctttctattccagtcctgctgccagctgtggatttctcactgggcgagtggaagactcagaccgagcagtctaaggcacaggacattctcggcgcagtctccctgctgctggagggggtgatggccgctagaggccagctggagccttcctgcctgtccagcctcctgggccagctgagcggccaggtgcgacttctgctcggagctctccagggcctgctgggcacacagcttccactgcagggcaggacaaccgcccacaaagaccccaacgctctgtttctgtccctgcagcagctgctgcgcggcaaggtgagattcctgctgctggtggagggtcctaccctgtgtgtgaggaggaccctgcctactaccgccgtgccaagctctacctcccagctgctgaccctgaacaagtttcccaacaggactagcggactgctggagaccaacttctccgtgacagctagaactgccggacctggcctgctgtctagactgcagggattcagggtgaaaataacccccggacagctgaaccagacctctcgctccccagtgcagatcagcggttatctgaaccgcacacatggccctgtgaatgggacacacggactgtttgccgggacatccctgcagacactggaggcctctgatatctcccctggcgcttttaataagggaagcctggcctttaatcttcagggagggctcccccctagcccttctctggccccagacggtcacacccccttcccacctagccctgctctgccaaccacacacggctctcctccacagctgcacccactgttccctgacccaagtaccaccatgccaaattctaccgctccccaccccgtgaccatgtatcctcacccaaggaacttgtcccaggaaactggcagcggcggttccggcgactacaaggacgacgacgacaagtgagctagcctagtgtgaaatagacatcagaattaagaaaaacgtagggtccaagtggttccccgttatggactcgctatctgtcaaccagatcttataccctgaagttcacctagatagcccgatagttaccaataagatagtagccatcctggagtatgctcgactgtttaaacctgcaggcatgcaagctgatctttttccctctgccaaaaattatggggacatcatgaagccccttgagcatctgacttctggctaataaaggaaatttattttcattgcaatagtgtgttggaattttttgtgtctctcactcggaaggacatatgggagggcaaatcatttaaaacatcagaatgagtatttggtttagagtttggcaacatatgcccatatgctggctgccatgaacaaaggttggctataaagaggtcatcagtatatgaaacagccccctgctgtccattccttattccatagaaaagccttgacttgaggttagattttttttatattttgttttgtgttatttttttctttaacatccctaaaattttccttacatgttttactagccagatttttcctcctctcctgactactcccagtcatagctgtccctcttctcttatggagatccctcgaggagctttttgcaaaagcctaggcctccaaaaaagcctcttcactacttctggaatagctcagaggccgcggcctcggcctctgcataaataaaaaaaattagtcagccatggggcggagaatgggcggaactgggcggagttaggggcgggatgggcggagttaggggcgggactatggttgctgactaattgctgcattaatgaatcggccaacgcgcggggagaggcggtttgcgtattgggcgctcttccgcttcctcgctcactgactcgctgcgctcggtcgttcggctgcggcgagcggtatcagctcactcaaaggcggtaatacggttatccacagaatcaggggataacgcaggaaagaacatgtgagcaaaaggccagcaaaaggccaggaaccgtaaaaaggccgcgttgctggcgtttttccataggctccgcccccctgacgagcatcacaaaaatcgacgctcaagtcagaggtggcgaaacccgacaggactataaagataccaggcgtttccccctggaagctccctcgtgcgctctcctgttccgaccctgccgcttaccggatacctgtccgcctttctcccttcgggaagcgtggcgctttctcatagctcacgctgtaggtatctcagttcggtgtaggtcgttcgctccaagctgggctgtgtgcacgaaccccccgttcagcccgaccgctgcgccttatccggtaactatcgtcttgagtccaacccggtaagacacgacttatcgccactggcagcagccactggtaacaggattagcagagcgaggtatgtaggcggtgctacagagttcttgaagtggtggcctaactacggctacactagaagaacagtatttggtatctgcgctctgctgaagccagttaccttcggaaaaagagttggtagctcttgatccggcaaacaaaccaccgctggtagcggtggtttttttgtttgcaagcagcagattacgcgcagaaaaaaaggatctcaagaagatcctttgatcttttctacggggtctgacgctcagtggaacgaaaactcacgttaagggattttggtcatgagattatcaaaaaggatcttcacctagatccttttaaattaaaaatgaagttttaaatcaatctaaagtatatatgagtaaacttggtctgacagttaccaatgcttaatcagtgaggcacctatctcagcgatctgtctatttcgttcatccatagttgcctgactccccgtcgtgtagataactacgatacgggagggcttaccatctggccccagtgctgcaatgataccgcgagacccacgctcaccggctccagatttatcagcaataaaccagccagccggaagggccgagcgcagaagtggtcctgcaactttatccgcctccatccagtctattaattgttgccgggaagctagagtaagtagttcgccagttaatagtttgcgcaacgttgttgccattgctacaggcatcgtggtgtcacgctcgtcgtttggtatggcttcattcagctccggttcccaacgatcaaggcgagttacatgatcccccatgttgtgcaaaaaagcggttagctccttcggtcctccgatcgttgtcagaagtaagttggccgcagtgttatcactcatggttatggcagcactgcataattctcttactgtcatgccatccgtaagatgcttttctgtgactggtgagtactcaaccaagtcattctgagaatagtgtatgcggcgaccgagttgctcttgcccggcgtcaatacgggataataccgcgccacatagcagaactttaaaagtgctcatcattggaaaacgttcttcggggcgaaaactctcaaggatcttaccgctgttgagatccagttcgatgtaacccactcgtgcacccaactgatcttcagcatcttttactttcaccagcgtttctgggtgagcaaaaacaggaaggcaaaatgccgcaaaaaagggaataagggcgacacggaaatgttgaatactcatactcttcctttttcaatattattgaagcatttatcagggttattgtctcatgagcggatacatatttgaatgtatttagaaaaataaacaaataggggttccgcgcacatttccccgaaaagtgccacctgacgtctaagaaaccattattatcatgacattaacctataaaaataggcgtatcacgaggccctttcgtctcgcgcgtttcggtgatgacggtgaaaacctctgacacatgcagctcccggagacggtcacagcttgtctgtaagcggatgccgggagcagacaagcccgtcagggcgcgtcagcgggtgttggcgggtgtcggggctggcttaactatgcggcatcagagcagattgtactgagagtgcaccattcgacgctctcccttatgcgactcctgcattaggaagcagcccagtagtaggttgaggccgttgagcaccgccgccgcaaggaatggtctggcttatcgaaattaatacgactcactatagggagaccg

SEQ ID NO: 113 - DNA, 5477 bp, synthetic construct
  source 1..5477: mol_type = other DNA
gaattcgagctcgccccgttacataacttacggtaaatggcccgcctggctgaccgcccaacgacccccgcccattgacgtcaataatgacgtatgttcccatagtaacgccaatagggactttccattgacgtcaatgggtggagtatttacggtaaactgcccacttggcagtacatcaagtgtatcatatgccaagtacgccccctattgacgtcaatgacggtaaatggcccgcctggcattatgcccagtacatgaccttatgggactttcctacttggcagtacatctacgtattagtcatcgctattaccatggtgatgcggttttggcagtacatcaatgggcgtggatagcggtttgactcacggggatttccaagtctccaccccattgacgtcaatgggagtttgttttggcaccaaaatcaacgggactttccaaaatgtcgtaacaactccgccccattgacgcaaatgggcggtaggcgtgtacggtgggaggtctatataagcagagctcgtttagtgaaccgtcagatcgcctggagacgccatccacgctgttttgacctccatagaagacaccgggaccgatccagcctccgggggatcgatccccccgatcctgagaacttcagggtgagtttggggacccttgattgttctttctttttcgctattgtaaaattcatgttatatggagggggcaaagttttcagggtgttgtttagaatgggaagatgtcccttgtatcaccatggaccctcatgataattttgtttctttcactttctactctgttgacaaccattgtctcctcttattttcttttcattttctgtaactttttcgttaaactttagcttgcatttgtaacgaatttttaaattcacttttgtttatttgtcagattgtaagtactttctctaatcacttttttttcaaggcaatcagggtatattatattgtacttcagcacagttttagagaacaattgttataattaaatgataaggtagaatatttctgcatataaattctggctggcgtggaaatattcttattggtagaaacaactacatcctggtcatcatcctgcctttctctttatggttacaatgatatacactgtttgagatgaggataaaatactctgagtccaaaccgggcccctctgctaaccatgttcatgccttcttctttttcctacagctcctgggcaacgtgctggttattgtgctgtctcatcattttggcaaagaattgtaatacgactcactatagggcgaattcggatccacgcgtcactatggaaaccgatactctgctgctgtgggtgctgctgctgtgggtgccagggtcaaccggaggcgccatggtggatacactgtctggcctgagctctgagcagggccagtctggagatatgaccatcgaggaggactccgccacacacattaaattcagcaagagagacgaagatggcaaagagctggccggcgcgacaatggagctgagggacagcagcggaaagaccatctcaacctggatctccgacggccaggtgaaagatttttacctgtaccccggcaagtatacctttgtggagacagccgctccagacggctacgaagtggccacagccatcacctttaccgtgaatgagcagggccaggtgaccgtgaacggcaaggccacaaaaggcgacgcccacattggctccggaggcagcggctgtatcatcggcaagggcagaagctacaagggcaccgtgtccattaccaagtccgggatcaagtgccagccctggagctctatgatcccccacgagcactccttcctgccctcttcatacaggggcaaggacctgcaggagaactactgcagaaaccccaggggcgaggagggcgggccctggtgctttacttctaatcctgaagtgcggtacgaggtgtgcgacatcccacagtgttcagaggtggagtgcatgacctgcaacggcgagtcatatcgcggactgatggaccacaccgagagtggcaagatttgccagcggtgggaccaccagaccccccaccgccacaagttcctgcccgagagatacccagataagggcttcgatgacaactactgccggaacccagacggccagcccagaccctggtgttacaccttggaccctcacaccaggtgggagtactgcgcaatcaagacctgtggcagcggcggttccggcgactacaaggacgacgacgacaagtgagctagcctagtgtgaaatagacatcagaattaagaaaaacgtagggtccaagtggttccccgttatggactcgctatctgtcaaccagatcttataccctgaagttcacctagatagcccgatagttaccaataagatagtagccatcctggagtatgctcgactgtttaaacctgcaggcatgcaagctgatctttttccctctgccaaaaattatggggacatcatgaagccccttgagcatctgacttctggctaataaaggaaatttattttcattgcaatagtgtgttggaattttttgtgtctctcactcggaaggacatatgggagggcaaatcatttaaaacatcagaatgagtatttggtttagagtttggcaacatatgcccatatgctggctgccatgaacaaaggttggctataaagaggtcatcagtatatgaaacagccccctgctgtccattccttattccatagaaaagccttgacttgaggttagattttttttatattttgttttgtgttatttttttctttaacatccctaaaattttccttacatgttttactagccagatttttcctcctctcctgactactcccagtcatagctgtccctcttctcttatggagatccctcgaggagctttttgcaaaagcctaggcctccaaaaaagcctcttcactacttctggaatagctcagaggccgcggcctcggcctctgcataaataaaaaaaattagtcagccatggggcggagaatgggcggaactgggcggagttaggggcgggatgggcggagttaggggcgggactatggttgctgactaattgctgcattaatgaatcggccaacgcgcggggagaggcggtttgcgtattgggcgctcttccgcttcctcgctcactgactcgctgcgctcggtcgttcggctgcggcgagcggtatcagctcactcaaaggcggtaatacggttatccacagaatcaggggataacgcaggaaagaacatgtgagcaaaaggccagcaaaaggccaggaaccgtaaaaaggccgcgttgctggcgtttttccataggctccgcccccctgacgagcatcacaaaaatcgacgctcaagtcagaggtggcgaaacccgacaggactataaagataccaggcgtttccccctggaagctccctcgtgcgctctcctgttccgaccctgccgcttaccggatacctgtccgcctttctcccttcgggaagcgtggcgctttctcatagctcacgctgtaggtatctcagttcggtgtaggtcgttcgctccaagctgggctgtgtgcacgaaccccccgttcagcccgaccgctgcgccttatccggtaactatcgtcttgagtccaacccggtaagacacgacttatcgccactggcagcagccactggtaacaggattagcagagcgaggtatgtaggcggtgctacagagttcttgaagtggtggcctaactacggctacactagaagaacagtatttggtatctgcgctctgctgaagccagttaccttcggaaaaagagttggtagctcttgatccggcaaacaaaccaccgctggtagcggtggtttttttgtttgcaagcagcagattacgcgcagaaaaaaaggatctcaagaagatcctttgatcttttctacggggtctgacgctcagtggaacgaaaactcacgttaagggattttggtcatgagattatcaaaaaggatcttcacctagatccttttaaattaaaaatgaagttttaaatcaatctaaagtatatatgagtaaacttggtctgacagttaccaatgcttaatcagtgaggcacctatctcagcgatctgtctatttcgttcatccatagttgcctgactccccgtcgtgtagataactacgatacgggagggcttaccatctggccccagtgctgcaatgataccgcgagacccacgctcaccggctccagatttatcagcaataaaccagccagccggaagggccgagcgcagaagtggtcctgcaactttatccgcctccatccagtctattaattgttgccgggaagctagagtaagtagttcgccagttaatagtttgcgcaacgttgttgccattgctacaggcatcgtggtgtcacgctcgtcgtttggtatggcttcattcagctccggttcccaacgatcaaggcgagttacatgatcccccatgttgtgcaaaaaagcggttagctccttcggtcctccgatcgttgtcagaagtaagttggccgcagtgttatcactcatggttatggcagcactgcataattctcttactgtcatgccatccgtaagatgcttttctgtgactggtgagtactcaaccaagtcattctgagaatagtgtatgcggcgaccgagttgctcttgcccggcgtcaatacgggataataccgcgccacatagcagaactttaaaagtgctcatcattggaaaacgttcttcggggcgaaaactctcaaggatcttaccgctgttgagatccagttcgatgtaacccactcgtgcacccaactgatcttcagcatcttttactttcaccagcgtttctgggtgagcaaaaacaggaaggcaaaatgccgcaaaaaagggaataagggcgacacggaaatgttgaatactcatactcttcctttttcaatattattgaagcatttatcagggttattgtctcatgagcggatacatatttgaatgtatttagaaaaataaacaaataggggttccgcgcacatttccccgaaaagtgccacctgacgtctaagaaaccattattatcatgacattaacctataaaaataggcgtatcacgaggccctttcgtctcgcgcgtttcggtgatgacggtgaaaacctctgacacatgcagctcccggagacggtcacagcttgtctgtaagcggatgccgggagcagacaagcccgtcagggcgcgtcagcgggtgttggcgggtgtcggggctggcttaactatgcggcatcagagcagattgtactgagagtgcaccattcgacgctctcccttatgcgactcctgcattaggaagcagcccagtagtaggttgaggccgttgagcaccgccgccgcaaggaatggtctggcttatcgaaattaatacgactcactatagggagaccg

SEQ ID NO: 114 - DNA, 5705 bp, synthetic construct
  source 1..5705: mol_type = other DNA
gaattcgagctcgccccgttacataacttacggtaaatggcccgcctggctgaccgcccaacgacccccgcccattgacgtcaataatgacgtatgttcccatagtaacgccaatagggactttccattgacgtcaatgggtggagtatttacggtaaactgcccacttggcagtacatcaagtgtatcatatgccaagtacgccccctattgacgtcaatgacggtaaatggcccgcctggcattatgcccagtacatgaccttatgggactttcctacttggcagtacatctacgtattagtcatcgctattaccatggtgatgcggttttggcagtacatcaatgggcgtggatagcggtttgactcacggggatttccaagtctccaccccattgacgtcaatgggagtttgttttggcaccaaaatcaacgggactttccaaaatgtcgtaacaactccgccccattgacgcaaatgggcggtaggcgtgtacggtgggaggtctatataagcagagctcgtttagtgaaccgtcagatcgcctggagacgccatccacgctgttttgacctccatagaagacaccgggaccgatccagcctccgggggatcgatccccccgatcctgagaacttcagggtgagtttggggacccttgattgttctttctttttcgctattgtaaaattcatgttatatggagggggcaaagttttcagggtgttgtttagaatgggaagatgtcccttgtatcaccatggaccctcatgataattttgtttctttcactttctactctgttgacaaccattgtctcctcttattttcttttcattttctgtaactttttcgttaaactttagcttgcatttgtaacgaatttttaaattcacttttgtttatttgtcagattgtaagtactttctctaatcacttttttttcaaggcaatcagggtatattatattgtacttcagcacagttttagagaacaattgttataattaaatgataaggtagaatatttctgcatataaattctggctggcgtggaaatattcttattggtagaaacaactacatcctggtcatcatcctgcctttctctttatggttacaatgatatacactgtttgagatgaggataaaatactctgagtccaaaccgggcccctctgctaaccatgttcatgccttcttctttttcctacagctcctgggcaacgtgctggttattgtgctgtctcatcattttggcaaagaattgtaatacgactcactatagggcgaattcggatccacgcgtcactatggaaaccgatactctgctgctgtgggtgctgctgctgtgggtgccagggtcaaccggagtgaccacactgtctggcctgagcggagagcagggcccatctggagatatgaccaccgaggaggactccgccacacacattaaattcagcaagagagacgaagatggcagggagctggccggcgcgacaatggagctgagggacagcagcggaaagaccatctcaacctggatctccgacggccacgtgaaagatttttacctgtaccccggcaagtatacctttgtggagacagccgctccagacggctacgaagtggccacaccgatcgagtttaccgtgaatgaggacggccaggtgaccgtggatggcgaagccacagaaggcgacgcccacaccggctccggaggcagcggccagatcgtgctgacccagagccccagcagcctgagcgccagcctgggcgagaaggtgaccatgacctgccgcgccagcagcagcgtgagctacatgaactggtaccagcagaagcccggcaccagccccaagcgctggatctacgacaccagcaaggtggccagcggcgtgcccgaccgcttcagcggcagcggcagcggcaccagctacagcctgaccatcagcagcatggaggccgaggacgccgccacctactactgccagcagtggagcagcaaccccctgaccttcggcgccggcaccaagctggagctgaagggcggcggcggcagcggcggcggcggcagcggcggcggcggcagccaggtgcagctgcagcagagcggcgccgagctggcccgccccggcgccagcgtgaagatgagctgcaagaccagcggctacaccttcacccgctacaccatgcactgggtgaagcagcgccccggccagggcctggagtggatcggctacatcaaccccagccgcggctacaccaactacaaccagaagttcaaggacaaggccaccctgaccaccgacaagagcagcagcaccgcctacatgcagctgagcagcctgaccagcgaggacagcgccgtgtactactgcgcccgctactacgacgaccactacagcctggactactggggccagggcaccaccctgaccgtgagcagcggcagcggcggttccggcgactacaaggacgacgacgacaagtgagctagcctagtgtgaaatagacatcagaattaagaaaaacgtagggtccaagtggttccccgttatggactcgctatctgtcaaccagatcttataccctgaagttcacctagatagcccgatagttaccaataagatagtagccatcctggagtatgctcgactgtttaaacctgcaggcatgcaagctgatctttttccctctgccaaaaattatggggacatcatgaagccccttgagcatctgacttctggctaataaaggaaatttattttcattgcaatagtgtgttggaattttttgtgtctctcactcggaaggacatatgggagggcaaatcatttaaaacatcagaatgagtatttggtttagagtttggcaacatatgcccatatgctggctgccatgaacaaaggttggctataaagaggtcatcagtatatgaaacagccccctgctgtccattccttattccatagaaaagccttgacttgaggttagattttttttatattttgttttgtgttatttttttctttaacatccctaaaattttccttacatgttttactagccagatttttcctcctctcctgactactcccagtcatagctgtccctcttctcttatggagatccctcgaggagctttttgcaaaagcctaggcctccaaaaaagcctcttcactacttctggaatagctcagaggccgcggcctcggcctctgcataaataaaaaaaattagtcagccatggggcggagaatgggcggaactgggcggagttaggggcgggatgggcggagttaggggcgggactatggttgctgactaattgctgcattaatgaatcggccaacgcgcggggagaggcggtttgcgtattgggcgctcttccgcttcctcgctcactgactcgctgcgctcggtcgttcggctgcggcgagcggtatcagctcactcaaaggcggtaatacggttatccacagaatcaggggataacgcaggaaagaacatgtgagcaaaaggccagcaaaaggccaggaaccgtaaaaaggccgcgttgctggcgtttttccataggctccgcccccctgacgagcatcacaaaaatcgacgctcaagtcagaggtggcgaaacccgacaggactataaagataccaggcgtttccccctggaagctccctcgtgcgctctcctgttccgaccctgccgcttaccggatacctgtccgcctttctcccttcgggaagcgtggcgctttctcatagctcacgctgtaggtatctcagttcggtgtaggtcgttcgctccaagctgggctgtgtgcacgaaccccccgttcagcccgaccgctgcgccttatccggtaactatcgtcttgagtccaacccggtaagacacgacttatcgccactggcagcagccactggtaacaggattagcagagcgaggtatgtaggcggtgctacagagttcttgaagtggtggcctaactacggctacactagaagaacagtatttggtatctgcgctctgctgaagccagttaccttcggaaaaagagttggtagctcttgatccggcaaacaaaccaccgctggtagcggtggtttttttgtttgcaagcagcagattacgcgcagaaaaaaaggatctcaagaagatcctttgatcttttctacggggtctgacgctcagtggaacgaaaactcacgttaagggattttggtcatgagattatcaaaaaggatcttcacctagatccttttaaattaaaaatgaagttttaaatcaatctaaagtatatatgagtaaacttggtctgacagttaccaatgcttaatcagtgaggcacctatctcagcgatctgtctatttcgttcatccatagttgcctgactccccgtcgtgtagataactacgatacgggagggcttaccatctggccccagtgctgcaatgataccgcgagacccacgctcaccggctccagatttatcagcaataaaccagccagccggaagggccgagcgcagaagtggtcctgcaactttatccgcctccatccagtctattaattgttgccgggaagctagagtaagtagttcgccagttaatagtttgcgcaacgttgttgccattgctacaggcatcgtggtgtcacgctcgtcgtttggtatggcttcattcagctccggttcccaacgatcaaggcgagttacatgatcccccatgttgtgcaaaaaagcggttagctccttcggtcctccgatcgttgtcagaagtaagttggccgcagtgttatcactcatggttatggcagcactgcataattctcttactgtcatgccatccgtaagatgcttttctgtgactggtgagtactcaaccaagtcattctgagaatagtgtatgcggcgaccgagttgctcttgcccggcgtcaatacgggataataccgcgccacatagcagaactttaaaagtgctcatcattggaaaacgttcttcggggcgaaaactctcaaggatcttaccgctgttgagatccagttcgatgtaacccactcgtgcacccaactgatcttcagcatcttttactttcaccagcgtttctgggtgagcaaaaacaggaaggcaaaatgccgcaaaaaagggaataagggcgacacggaaatgttgaatactcatactcttcctttttcaatattattgaagcatttatcagggttattgtctcatgagcggatacatatttgaatgtatttagaaaaataaacaaataggggttccgcgcacatttccccgaaaagtgccacctgacgtctaagaaaccattattatcatgacattaacctataaaaataggcgtatcacgaggccctttcgtctcgcgcgtttcggtgatgacggtgaaaacctctgacacatgcagctcccggagacggtcacagcttgtctgtaagcggatgccgggagcagacaagcccgtcagggcgcgtcagcgggtgttggcgggtgtcggggctggcttaactatgcggcatcagagcagattgtactgagagtgcaccattcgacgctctcccttatgcgactcctgcattaggaagcagcccagtagtaggttgaggccgttgagcaccgccgccgcaaggaatggtctggcttatcgaaattaatacgactcactatagggagaccg

SEQ ID NO: 115 - DNA, 5717 bp, synthetic construct
  source 1..5717: mol_type = other DNA
gaattcgagctcgccccgttacataacttacggtaaatggcccgcctggctgaccgcccaacgacccccgcccattgacgtcaataatgacgtatgttcccatagtaacgccaatagggactttccattgacgtcaatgggtggagtatttacggtaaactgcccacttggcagtacatcaagtgtatcatatgccaagtacgccccctattgacgtcaatgacggtaaatggcccgcctggcattatgcccagtacatgaccttatgggactttcctacttggcagtacatctacgtattagtcatcgctattaccatggtgatgcggttttggcagtacatcaatgggcgtggatagcggtttgactcacggggatttccaagtctccaccccattgacgtcaatgggagtttgttttggcaccaaaatcaacgggactttccaaaatgtcgtaacaactccgccccattgacgcaaatgggcggtaggcgtgtacggtgggaggtctatataagcagagctcgtttagtgaaccgtcagatcgcctggagacgccatccacgctgttttgacctccatagaagacaccgggaccgatccagcctccgggggatcgatccccccgatcctgagaacttcagggtgagtttggggacccttgattgttctttctttttcgctattgtaaaattcatgttatatggagggggcaaagttttcagggtgttgtttagaatgggaagatgtcccttgtatcaccatggaccctcatgataattttgtttctttcactttctactctgttgacaaccattgtctcctcttattttcttttcattttctgtaactttttcgttaaactttagcttgcatttgtaacgaatttttaaattcacttttgtttatttgtcagattgtaagtactttctctaatcacttttttttcaaggcaatcagggtatattatattgtacttcagcacagttttagagaacaattgttataattaaatgataaggtagaatatttctgcatataaattctggctggcgtggaaatattcttattggtagaaacaactacatcctggtcatcatcctgcctttctctttatggttacaatgatatacactgtttgagatgaggataaaatactctgagtccaaaccgggcccctctgctaaccatgttcatgccttcttctttttcctacagctcctgggcaacgtgctggttattgtgctgtctcatcattttggcaaagaattgtaatacgactcactatagggcgaattcggatccacgcgtcactatggaaaccgatactctgctgctgtgggtgctgctgctgtgggtgccagggtcaaccggagtgaccacactgtctggcctgagcggagagcagggcccatctggagatatgaccaccgaggaggactccgccacacacattaaattcagcaagagagacgaagatggcagggagctggccggcgcgacaatggagctgagggacagcagcggaaagaccatctcaacctggatctccgacggccacgtgaaagatttttacctgtaccccggcaagtatacctttgtggagacagccgctccagacggctacgaagtggccacaccgatcgagtttaccgtgaatgaggacggccaggtgaccgtggatggcgaagccacagaaggcgacgcccacaccggctccggaggcagcggcgaggtgcagctggtggagagcggcggcggcctggtgcagcccggcggcagcctgcgcctgagctgcgccgccagcggctacagcttcaccggctacaccatgaactgggtgcgccaggcccccggcaagggcctggagtgggtggccctgatcaacccctacaagggcgtgagcacctacaaccagaagttcaaggaccgcttcaccatcagcgtggacaagagcaagaacaccgcctacctgcagatgaacagcctgcgcgccgaggacaccgccgtgtactactgcgcccgcagcggctactacggcgacagcgactggtacttcgacgtgtggggccagggcaccctggtgaccgtgagcagcggcggcggcggcagcggcggcggcggcagcggcggcggcggcagcgacatccagatgacccagagccccagcagcctgagcgccagcgtgggcgaccgcgtgaccatcacctgccgcgccagccaggacatccgcaactacctgaactggtaccagcagaagcccggcaaggcccccaagctgctgatctactacaccagccgcctggagagcggcgtgcccagccgcttcagcggcagcggcagcggcaccgactacaccctgaccatcagcagcctgcagcccgaggacttcgccacctactactgccagcagggcaacaccctgccctggaccttcggccagggcaccaaggtggagatcaagggcagcggcggttccggcgactacaaggacgacgacgacaagtgagctagcctagtgtgaaatagacatcagaattaagaaaaacgtagggtccaagtggttccccgttatggactcgctatctgtcaaccagatcttataccctgaagttcacctagatagcccgatagttaccaataagatagtagccatcctggagtatgctcgactgtttaaacctgcaggcatgcaagctgatctttttccctctgccaaaaattatggggacatcatgaagccccttgagcatctgacttctggctaataaaggaaatttattttcattgcaatagtgtgttggaattttttgtgtctctcactcggaaggacatatgggagggcaaatcatttaaaacatcagaatgagtatttggtttagagtttggcaacatatgcccatatgctggctgccatgaacaaaggttggctataaagaggtcatcagtatatgaaacagccccctgctgtccattccttattccatagaaaagccttgacttgaggttagattttttttatattttgttttgtgttatttttttctttaacatccctaaaattttccttacatgttttactagccagatttttcctcctctcctgactactcccagtcatagctgtccctcttctcttatggagatccctcgaggagctttttgcaaaagcctaggcctccaaaaaagcctcttcactacttctggaatagctcagaggccgcggcctcggcctctgcataaataaaaaaaattagtcagccatggggcggagaatgggcggaactgggcggagttaggggcgggatgggcggagttaggggcgggactatggttgctgactaattgctgcattaatgaatcggccaacgcgcggggagaggcggtttgcgtattgggcgctcttccgcttcctcgctcactgactcgctgcgctcggtcgttcggctgcggcgagcggtatcagctcactcaaaggcggtaatacggttatccacagaatcaggggataacgcaggaaagaacatgtgagcaaaaggccagcaaaaggccaggaaccgtaaaaaggccgcgttgctggcgtttttccataggctccgcccccctgacgagcatcacaaaaatcgacgctcaagtcagaggtggcgaaacccgacaggactataaagataccaggcgtttccccctggaagctccctcgtgcgctctcctgttccgaccctgccgcttaccggatacctgtccgcctttctcccttcgggaagcgtggcgctttctcatagctcacgctgtaggtatctcagttcggtgtaggtcgttcgctccaagctgggctgtgtgcacgaaccccccgttcagcccgaccgctgcgccttatccggtaactatcgtcttgagtccaacccggtaagacacgacttatcgccactggcagcagccactggtaacaggattagcagagcgaggtatgtaggcggtgctacagagttcttgaagtggtggcctaactacggctacactagaagaacagtatttggtatctgcgctctgctgaagccagttaccttcggaaaaagagttggtagctcttgatccggcaaacaaaccaccgctggtagcggtggtttttttgtttgcaagcagcagattacgcgcagaaaaaaaggatctcaagaagatcctttgatcttttctacggggtctgacgctcagtggaacgaaaactcacgttaagggattttggtcatgagattatcaaaaaggatcttcacctagatccttttaaattaaaaatgaagttttaaatcaatctaaagtatatatgagtaaacttggtctgacagttaccaatgcttaatcagtgaggcacctatctcagcgatctgtctatttcgttcatccatagttgcctgactccccgtcgtgtagataactacgatacgggagggcttaccatctggccccagtgctgcaatgataccgcgagacccacgctcaccggctccagatttatcagcaataaaccagccagccggaagggccgagcgcagaagtggtcctgcaactttatccgcctccatccagtctattaattgttgccgggaagctagagtaagtagttcgccagttaatagtttgcgcaacgttgttgccattgctacaggcatcgtggtgtcacgctcgtcgtttggtatggcttcattcagctccggttcccaacgatcaaggcgagttacatgatcccccatgttgtgcaaaaaagcggttagctccttcggtcctccgatcgttgtcagaagtaagttggccgcagtgttatcactcatggttatggcagcactgcataattctcttactgtcatgccatccgtaagatgcttttctgtgactggtgagtactcaaccaagtcattctgagaatagtgtatgcggcgaccgagttgctcttgcccggcgtcaatacgggataataccgcgccacatagcagaactttaaaagtgctcatcattggaaaacgttcttcggggcgaaaactctcaaggatcttaccgctgttgagatccagttcgatgtaacccactcgtgcacccaactgatcttcagcatcttttactttcaccagcgtttctgggtgagcaaaaacaggaaggcaaaatgccgcaaaaaagggaataagggcgacacggaaatgttgaatactcatactcttcctttttcaatattattgaagcatttatcagggttattgtctcatgagcggatacatatttgaatgtatttagaaaaataaacaaataggggttccgcgcacatttccccgaaaagtgccacctgacgtctaagaaaccattattatcatgacattaacctataaaaataggcgtatcacgaggccctttcgtctcgcgcgtttcggtgatgacggtgaaaacctctgacacatgcagctcccggagacggtcacagcttgtctgtaagcggatgccgggagcagacaagcccgtcagggcgcgtcagcgggtgttggcgggtgtcggggctggcttaactatgcggcatcagagcagattgtactgagagtgcaccattcgacgctctcccttatgcgactcctgcattaggaagcagcccagtagtaggttgaggccgttgagcaccgccgccgcaaggaatggtctggcttatcgaaattaatacgactcactatagggagaccg

SEQ ID NO: 116 - DNA, 5480 bp, synthetic construct
  source 1..5480: mol_type = other DNA
gaattcgagctcgccccgttacataacttacggtaaatggcccgcctggctgaccgcccaacgacccccgcccattgacgtcaataatgacgtatgttcccatagtaacgccaatagggactttccattgacgtcaatgggtggagtatttacggtaaactgcccacttggcagtacatcaagtgtatcatatgccaagtacgccccctattgacgtcaatgacggtaaatggcccgcctggcattatgcccagtacatgaccttatgggactttcctacttggcagtacatctacgtattagtcatcgctattaccatggtgatgcggttttggcagtacatcaatgggcgtggatagcggtttgactcacggggatttccaagtctccaccccattgacgtcaatgggagtttgttttggcaccaaaatcaacgggactttccaaaatgtcgtaacaactccgccccattgacgcaaatgggcggtaggcgtgtacggtgggaggtctatataagcagagctcgtttagtgaaccgtcagatcgcctggagacgccatccacgctgttttgacctccatagaagacaccgggaccgatccagcctccgggggatcgatccccccgatcctgagaacttcagggtgagtttggggacccttgattgttctttctttttcgctattgtaaaattcatgttatatggagggggcaaagttttcagggtgttgtttagaatgggaagatgtcccttgtatcaccatggaccctcatgataattttgtttctttcactttctactctgttgacaaccattgtctcctcttattttcttttcattttctgtaactttttcgttaaactttagcttgcatttgtaacgaatttttaaattcacttttgtttatttgtcagattgtaagtactttctctaatcacttttttttcaaggcaatcagggtatattatattgtacttcagcacagttttagagaacaattgttataattaaatgataaggtagaatatttctgcatataaattctggctggcgtggaaatattcttattggtagaaacaactacatcctggtcatcatcctgcctttctctttatggttacaatgatatacactgtttgagatgaggataaaatactctgagtccaaaccgggcccctctgctaaccatgttcatgccttcttctttttcctacagctcctgggcaacgtgctggttattgtgctgtctcatcattttggcaaagaattgtaatacgactcactatagggcgaattcggatccacgcgtcactatggaaaccgatactctgctgctgtgggtgctgctgctgtgggtgccagggtcaaccggagtgaccacactgtctggcctgagcggagagcagggcccatctggagatatgaccaccgaggaggactccgccacacacattaaattcagcaagagagacgaagatggcagggagctggccggcgcgacaatggagctgagggacagcagcggaaagaccatctcaacctggatctccgacggccacgtgaaagatttttacctgtaccccggcaagtatacctttgtggagacagccgctccagacggctacgaagtggccacaccgatcgagtttaccgtgaatgaggacggccaggtgaccgtggatggcgaagccacagaaggcgacgcccacaccggctccggaggcagcggcgagggcatctgccgcaaccgcgtgaccaacaacgtgaaggacgtgaccaagctggtggccaacctgcccaaggactacatgatcaccctgaagtacgtgcccggcatggacgtgctgcccagccactgctggatcagcgagatggtggtgcagctgtcggacagcctgaccgacctgctggacaagttcagcaacatcagcgagggcctgagcaactacagcatcatcgacaagctggtgaacatcgtggacgacctggtggagtgcgtgaaggagaacagcagcaaggacctgaagaagagcttcaagagccccgagccccgcctgttcacccccgaggagttcttccgcatcttcaaccgcagcatcgacgccttcaaggacttcgtggtggccagcgagaccagcgactgcgtggtgagcagcaccctgagccccgagaaggacagccgcgtgagcgtgaccaagcccttcatgctgccccccgtggccgccggcagcggcggttccggcgactacaaggacgacgacgacaagtgagctagcctagtgtgaaatagacatcagaattaagaaaaacgtagggtccaagtggttccccgttatggactcgctatctgtcaaccagatcttataccctgaagttcacctagatagcccgatagttaccaataagatagtagccatcctggagtatgctcgactgtttaaacctgcaggcatgcaagctgatctttttccctctgccaaaaattatggggacatcatgaagccccttgagcatctgacttctggctaataaaggaaatttattttcattgcaatagtgtgttggaattttttgtgtctctcactcggaaggacatatgggagggcaaatcatttaaaacatcagaatgagtatttggtttagagtttggcaacatatgcccatatgctggctgccatgaacaaaggttggctataaagaggtcatcagtatatgaaacagccccctgctgtccattccttattccatagaaaagccttgacttgaggttagattttttttatattttgttttgtgttatttttttctttaacatccctaaaattttccttacatgttttactagccagatttttcctcctctcctgactactcccagtcatagctgtccctcttctcttatggagatccctcgaggagctttttgcaaaagcctaggcctccaaaaaagcctcttcactacttctggaatagctcagaggccgcggcctcggcctctgcataaataaaaaaaattagtcagccatggggcggagaatgggcggaactgggcggagttaggggcgggatgggcggagttaggggcgggactatggttgctgactaattgctgcattaatgaatcggccaacgcgcggggagaggcggtttgcgtattgggcgctcttccgcttcctcgctcactgactcgctgcgctcggtcgttcggctgcggcgagcggtatcagctcactcaaaggcggtaatacggttatccacagaatcaggggataacgcaggaaagaacatgtgagcaaaaggccagcaaaaggccaggaaccgtaaaaaggccgcgttgctggcgtttttccataggctccgcccccctgacgagcatcacaaaaatcgacgctcaagtcagaggtggcgaaacccgacaggactataaagataccaggcgtttccccctggaagctccctcgtgcgctctcctgttccgaccctgccgcttaccggatacctgtccgcctttctcccttcgggaagcgtggcgctttctcatagctcacgctgtaggtatctcagttcggtgtaggtcgttcgctccaagctgggctgtgtgcacgaaccccccgttcagcccgaccgctgcgccttatccggtaactatcgtcttgagtccaacccggtaagacacgacttatcgccactggcagcagccactggtaacaggattagcagagcgaggtatgtaggcggtgctacagagttcttgaagtggtggcctaactacggctacactagaagaacagtatttggtatctgcgctctgctgaagccagttaccttcggaaaaagagttggtagctcttgatccggcaaacaaaccaccgctggtagcggtggtttttttgtttgcaagcagcagattacgcgcagaaaaaaaggatctcaagaagatcctttgatcttttctacggggtctgacgctcagtggaacgaaaactcacgttaagggattttggtcatgagattatcaaaaaggatcttcacctagatccttttaaattaaaaatgaagttttaaatcaatctaaagtatatatgagtaaacttggtctgacagttaccaatgcttaatcagtgaggcacctatctcagcgatctgtctatttcgttcatccatagttgcctgactccccgtcgtgtagataactacgatacgggagggcttaccatctggccccagtgctgcaatgataccgcgagacccacgctcaccggctccagatttatcagcaataaaccagccagccggaagggccgagcgcagaagtggtcctgcaactttatccgcctccatccagtctattaattgttgccgggaagctagagtaagtagttcgccagttaatagtttgcgcaacgttgttgccattgctacaggcatcgtggtgtcacgctcgtcgtttggtatggcttcattcagctccggttcccaacgatcaaggcgagttacatgatcccccatgttgtgcaaaaaagcggttagctccttcggtcctccgatcgttgtcagaagtaagttggccgcagtgttatcactcatggttatggcagcactgcataattctcttactgtcatgccatccgtaagatgcttttctgtgactggtgagtactcaaccaagtcattctgagaatagtgtatgcggcgaccgagttgctcttgcccggcgtcaatacgggataataccgcgccacatagcagaactttaaaagtgctcatcattggaaaacgttcttcggggcgaaaactctcaaggatcttaccgctgttgagatccagttcgatgtaacccactcgtgcacccaactgatcttcagcatcttttactttcaccagcgtttctgggtgagcaaaaacaggaaggcaaaatgccgcaaaaaagggaataagggcgacacggaaatgttgaatactcatactcttcctttttcaatattattgaagcatttatcagggttattgtctcatgagcggatacatatttgaatgtatttagaaaaataaacaaataggggttccgcgcacatttccccgaaaagtgccacctgacgtctaagaaaccattattatcatgacattaacctataaaaataggcgtatcacgaggccctttcgtctcgcgcgtttcggtgatgacggtgaaaacctctgacacatgcagctcccggagacggtcacagcttgtctgtaagcggatgccgggagcagacaagcccgtcagggcgcgtcagcgggtgttggcgggtgtcggggctggcttaactatgcggcatcagagcagattgtactgagagtgcaccattcgacgctctcccttatgcgactcctgcattaggaagcagcccagtagtaggttgaggccgttgagcaccgccgccgcaaggaatggtctggcttatcgaaattaatacgactcactatagggagaccg

SEQ ID NO: 117 - DNA, 5408 bp, synthetic construct
  source 1..5408: mol_type = other DNA
gaattcgagctcgccccgttacataacttacggtaaatggcccgcctggctgaccgcccaacgacccccgcccattgacgtcaataatgacgtatgttcccatagtaacgccaatagggactttccattgacgtcaatgggtggagtatttacggtaaactgcccacttggcagtacatcaagtgtatcatatgccaagtacgccccctattgacgtcaatgacggtaaatggcccgcctggcattatgcccagtacatgaccttatgggactttcctacttggcagtacatctacgtattagtcatcgctattaccatggtgatgcggttttggcagtacatcaatgggcgtggatagcggtttgactcacggggatttccaagtctccaccccattgacgtcaatgggagtttgttttggcaccaaaatcaacgggactttccaaaatgtcgtaacaactccgccccattgacgcaaatgggcggtaggcgtgtacggtgggaggtctatataagcagagctcgtttagtgaaccgtcagatcgcctggagacgccatccacgctgttttgacctccatagaagacaccgggaccgatccagcctccgggggatcgatccccccgatcctgagaacttcagggtgagtttggggacccttgattgttctttctttttcgctattgtaaaattcatgttatatggagggggcaaagttttcagggtgttgtttagaatgggaagatgtcccttgtatcaccatggaccctcatgataattttgtttctttcactttctactctgttgacaaccattgtctcctcttattttcttttcattttctgtaactttttcgttaaactttagcttgcatttgtaacgaatttttaaattcacttttgtttatttgtcagattgtaagtactttctctaatcacttttttttcaaggcaatcagggtatattatattgtacttcagcacagttttagagaacaattgttataattaaatgataaggtagaatatttctgcatataaattctggctggcgtggaaatattcttattggtagaaacaactacatcctggtcatcatcctgcctttctctttatggttacaatgatatacactgtttgagatgaggataaaatactctgagtccaaaccgggcccctctgctaaccatgttcatgccttcttctttttcctacagctcctgggcaacgtgctggttattgtgctgtctcatcattttggcaaagaattgtaatacgactcactatagggcgaattcggatccacgcgtcactatggaaaccgatactctgctgctgtgggtgctgctgctgtgggtgccagggtcaaccggagtgaccacactgtctggcctgagcggagagcagggcccatctggagatatgaccaccgaggaggactccgccacacacattaaattcagcaagagagacgaagatggcagggagctggccggcgcgacaatggagctgagggacagcagcggaaagaccatctcaacctggatctccgacggccacgtgaaagatttttacctgtaccccggcaagtatacctttgtggagacagccgctccagacggctacgaagtggccacaccgatcgagtttaccgtgaatgaggacggccaggtgaccgtggatggcgaagccacagaaggcgacgcccacaccggctccggaggcagcggcaaggagatctgcggcaatcctgtgaccgataacgtgaaagacattaccaagctggtggccaacctgccaaatgactacatgattaccctgaactacgtggccggcatggacgtgctgccctcccattgttggctcagggatatggtgattcagctgtccctgagcctcaccacactgctcgacaagttcagcaacatcagcgagggactgagcaactacagcatcattgacaagctggggaagatcgttgatgacctggtgctgtgcatggaggagaacgcccctaagaacatcaaggagagcccaaagaggcctgagacccggagcttcacacctgaggagttcttcagcatcttcaacaggtccatcgacgcctttaaggacttcatggtggcttccgataccagtgactgtgtgctgtccggcagcggcggttccggcgactacaaggacgacgacgacaagtgagctagcctagtgtgaaatagacatcagaattaagaaaaacgtagggtccaagtggttccccgttatggactcgctatctgtcaaccagatcttataccctgaagttcacctagatagcccgatagttaccaataagatagtagccatcctggagtatgctcgactgtttaaacctgcaggcatgcaagctgatctttttccctctgccaaaaattatggggacatcatgaagccccttgagcatctgacttctggctaataaaggaaatttattttcattgcaatagtgtgttggaattttttgtgtctctcactcggaaggacatatgggagggcaaatcatttaaaacatcagaatgagtatttggtttagagtttggcaacatatgcccatatgctggctgccatgaacaaaggttggctataaagaggtcatcagtatatgaaacagccccctgctgtccattccttattccatagaaaagccttgacttgaggttagattttttttatattttgttttgtgttatttttttctttaacatccctaaaattttccttacatgttttactagccagatttttcctcctctcctgactactcccagtcatagctgtccctcttctcttatggagatccctcgaggagctttttgcaaaagcctaggcctccaaaaaagcctcttcactacttctggaatagctcagaggccgcggcctcggcctctgcataaataaaaaaaattagtcagccatggggcggagaatgggcggaactgggcggagttaggggcgggatgggcggagttaggggcgggactatggttgctgactaattgctgcattaatgaatcggccaacgcgcggggagaggcggtttgcgtattgggcgctcttccgcttcctcgctcactgactcgctgcgctcggtcgttcggctgcggcgagcggtatcagctcactcaaaggcggtaatacggttatccacagaatcaggggataacgcaggaaagaacatgtgagcaaaaggccagcaaaaggccaggaaccgtaaaaaggccgcgttgctggcgtttttccataggctccgcccccctgacgagcatcacaaaaatcgacgctcaagtcagaggtggcgaaacccgacaggactataaagataccaggcgtttccccctggaagctccctcgtgcgctctcctgttccgaccctgccgcttaccggatacctgtccgcctttctcccttcgggaagcgtggcgctttctcatagctcacgctgtaggtatctcagttcggtgtaggtcgttcgctccaagctgggctgtgtgcacgaaccccccgttcagcccgaccgctgcgccttatccggtaactatcgtcttgagtccaacccggtaagacacgacttatcgccactggcagcagccactggtaacaggattagcagagcgaggtatgtaggcggtgctacagagttcttgaagtggtggcctaactacggctacactagaagaacagtatttggtatctgcgctctgctgaagccagttaccttcggaaaaagagttggtagctcttgatccggcaaacaaaccaccgctggtagcggtggtttttttgtttgcaagcagcagattacgcgcagaaaaaaaggatctcaagaagatcctttgatcttttctacggggtctgacgctcagtggaacgaaaactcacgttaagggattttggtcatgagattatcaaaaaggatcttcacctagatccttttaaattaaaaatgaagttttaaatcaatctaaagtatatatgagtaaacttggtctgacagttaccaatgcttaatcagtgaggcacctatctcagcgatctgtctatttcgttcatccatagttgcctgactccccgtcgtgtagataactacgatacgggagggcttaccatctggccccagtgctgcaatgataccgcgagacccacgctcaccggctccagatttatcagcaataaaccagccagccggaagggccgagcgcagaagtggtcctgcaactttatccgcctccatccagtctattaattgttgccgggaagctagagtaagtagttcgccagttaatagtttgcgcaacgttgttgccattgctacaggcatcgtggtgtcacgctcgtcgtttggtatggcttcattcagctccggttcccaacgatcaaggcgagttacatgatcccccatgttgtgcaaaaaagcggttagctccttcggtcctccgatcgttgtcagaagtaagttggccgcagtgttatcactcatggttatggcagcactgcataattctcttactgtcatgccatccgtaagatgcttttctgtgactggtgagtactcaaccaagtcattctgagaatagtgtatgcggcgaccgagttgctcttgcccggcgtcaatacgggataataccgcgccacatagcagaactttaaaagtgctcatcattggaaaacgttcttcggggcgaaaactctcaaggatcttaccgctgttgagatccagttcgatgtaacccactcgtgcacccaactgatcttcagcatcttttactttcaccagcgtttctgggtgagcaaaaacaggaaggcaaaatgccgcaaaaaagggaataagggcgacacggaaatgttgaatactcatactcttcctttttcaatattattgaagcatttatcagggttattgtctcatgagcggatacatatttgaatgtatttagaaaaataaacaaataggggttccgcgcacatttccccgaaaagtgccacctgacgtctaagaaaccattattatcatgacattaacctataaaaataggcgtatcacgaggccctttcgtctcgcgcgtttcggtgatgacggtgaaaacctctgacacatgcagctcccggagacggtcacagcttgtctgtaagcggatgccgggagcagacaagcccgtcagggcgcgtcagcgggtgttggcgggtgtcggggctggcttaactatgcggcatcagagcagattgtactgagagtgcaccattcgacgctctcccttatgcgactcctgcattaggaagcagcccagtagtaggttgaggccgttgagcaccgccgccgcaaggaatggtctggcttatcgaaattaatacgactcactatagggagaccg

SEQ ID NO: 118 - DNA, 6197 bp, synthetic construct
  source 1..6197: mol_type = other DNA
ggaattcgagctcgccccgttacataacttacggtaaatggcccgcctggctgaccgcccaacgacccccgcccattgacgtcaataatgacgtatgttcccatagtaacgccaatagggactttccattgacgtcaatgggtggagtatttacggtaaactgcccacttggcagtacatcaagtgtatcatatgccaagtacgccccctattgacgtcaatgacggtaaatggcccgcctggcattatgcccagtacatgaccttatgggactttcctacttggcagtacatctacgtattagtcatcgctattaccatggtgatgcggttttggcagtacatcaatgggcgtggatagcggtttgactcacggggatttccaagtctccaccccattgacgtcaatgggagtttgttttggcaccaaaatcaacgggactttccaaaatgtcgtaacaactccgccccattgacgcaaatgggcggtaggcgtgtacggtgggaggtctatataagcagagctcgtttagtgaaccgtcagatcgcctggagacgccatccacgctgttttgacctccatagaagacaccgggaccgatccagcctccgggggatcgatccccccgatcctgagaacttcagggtgagtttggggacccttgattgttctttctttttcgctattgtaaaattcatgttatatggagggggcaaagttttcagggtgttgtttagaatgggaagatgtcccttgtatcaccatggaccctcatgataattttgtttctttcactttctactctgttgacaaccattgtctcctcttattttcttttcattttctgtaactttttcgttaaactttagcttgcatttgtaacgaatttttaaattcacttttgtttatttgtcagattgtaagtactttctctaatcacttttttttcaaggcaatcagggtatattatattgtacttcagcacagttttagagaacaattgttataattaaatgataaggtagaatatttctgcatataaattctggctggcgtggaaatattcttattggtagaaacaactacatcctggtcatcatcctgcctttctctttatggttacaatgatatacactgtttgagatgaggataaaatactctgagtccaaaccgggcccctctgctaaccatgttcatgccttcttctttttcctacagctcctgggcaacgtgctggttattgtgctgtctcatcattttggcaaagaattgtaatacgactcactatagggcgaattcggatcccccggtagttaattaatacgcgtcactatgttgtcttatttaattcttgcaattattgtttcgcctatcttaggcgcccacatcgtgatggtggatgcctataaaccaacaaagggcagcggcggctccggaaaaattgaaatcgtcttccctcagcatactactggagattggaagagggttcctcatgaatacaattactgtcccactagcgcagataagaactcacatgggactcagacaggaattcctgttgagctaacaatgccccagggactaacaacacatcaggttgatgggtttatgtgccactctgctttatggatgaccacttgtgatttcagatggtatggacctaaatacataacccattccatacataatgaggagcctacagattaccaatgtttggaagccatcaaggcatataaagatggtgttggctttaatccagggttccctcctcagagctgtgggtatggtacggtcacggacgctgaagcccatattataacagtcactcctcactctgttaaagtagatgagtacactggagaatggattgacccacatttcatcgggggcagatgcaagggcaagatttgtgaaacagtccacaactccacaaaatggtttacatcttcagatggagaaagtgtctgtagtcaattattcactctagttggaggaacttttttctctgactcagaggaaattacttcaatgggactaccagaaacagggataaggagtaatcagtttccttacatatccacagagggaatatgcaagatgccattctgtagaaagccagggtacaaacttaagaatgacctctggtttcagatcacagacccagatctggataaaacagttagagatcttccgcacatcaaagattgtgatctctcctcatccattataacaccaggggaacatgcaacagacatatccctgatatcagatgtggaacgaatactggattatgctctttgtcaaaacacatggggtaaaattgaagccggagaaccaatcactcctgtagatctcagctacctcggaccaaagaatcccggagtaggcccggttttcaccatcatcaatagttctttgcattacttcacatccaaatatctgcgtgtggaactggaaagtcctgttatacccagaatggaaggaagagttgcaggaactagaattgtgcagcaattgtgggatcaatggttcccttttggagaggctgagattggacctaatggtgtgttgaagaccaagcaaggatacaaattcccattacacatcattggaacaggagaggtagacagtgacatcaaaatggagaggattgttaaacactgggaacacccccatattgaagccgctcagacatatttaaaaaaagatgatacagaagaagtcatctattatggcgacacagggatctcaaaatacccagttgagttggtcgagggctggtttagtggatggaggagctctatcatgggagtggtggctgtgattatcggattcgtgattttaatatttttaattagactgattggagtcctatccagtctttttagaccaaaaagaaggccaatttataaatcggatgtagagatggctcatttccgttaactcaaatcctgctaggtatgaaaaaaactaacagatatcacgcctaggactagtgtgaaatagacatcagaattaagaaaaacgtagggtccaagtggttccccgttatggactcgctatctgtcaaccagatcttataccctgaagttcacctagatagcccgatagttaccaataagatagtagccatcctggagtatgctcgactgtttaaacctgcaggcatgcaagctgatctttttccctctgccaaaaattatggggacatcatgaagccccttgagcatctgacttctggctaataaaggaaatttattttcattgcaatagtgtgttggaattttttgtgtctctcactcggaaggacatatgggagggcaaatcatttaaaacatcagaatgagtatttggtttagagtttggcaacatatgcccatatgctggctgccatgaacaaaggttggctataaagaggtcatcagtatatgaaacagccccctgctgtccattccttattccatagaaaagccttgacttgaggttagattttttttatattttgttttgtgttatttttttctttaacatccctaaaattttccttacatgttttactagccagatttttcctcctctcctgactactcccagtcatagctgtccctcttctcttatggagatccctcgaggagctttttgcaaaagcctaggcctccaaaaaagcctcttcactacttctggaatagctcagaagccgaggcggcctcggcctctgcataaataaaaaaaattagtcagccatggggcggagaatgggcggaactgggcggagttaggggcgggatgggcggagttaggggcgggactatggttgctgactaattgctgcattaatgaatcggccaacgcgcggggagaggcggtttgcgtattgggcgctcttccgcttcctcgctcactgactcgctgcgctcggtcgttcggctgcggcgagcggtatcagctcactcaaaggcggtaatacggttatccacagaatcaggggataacgcaggaaagaacatgtgagcaaaaggccagcaaaaggccaggaaccgtaaaaaggccgcgttgctggcgtttttccataggctccgcccccctgacgagcatcacaaaaatcgacgctcaagtcagaggtggcgaaacccgacaggactataaagataccaggcgtttccccctggaagctccctcgtgcgctctcctgttccgaccctgccgcttaccggatacctgtccgcctttctcccttcgggaagcgtggcgctttctcatagctcacgctgtaggtatctcagttcggtgtaggtcgttcgctccaagctgggctgtgtgcacgaaccccccgttcagcccgaccgctgcgccttatccggtaactatcgtcttgagtccaacccggtaagacacgacttatcgccactggcagcagccactggtaacaggattagcagagcgaggtatgtaggcggtgctacagagttcttgaagtggtggcctaactacggctacactagaagaacagtatttggtatctgcgctctgctgaagccagttaccttcggaaaaagagttggtagctcttgatccggcaaacaaaccaccgctggtagcggtggtttttttgtttgcaagcagcagattacgcgcagaaaaaaaggatctcaagaagatcctttgatcttttctacggggtctgacgctcagtggaacgaaaactcacgttaagggattttggtcatgagattatcaaaaaggatcttcacctagatccttttaaattaaaaatgaagttttaaatcaatctaaagtatatatgagtaaacttggtctgacagttaccaatgcttaatcagtgaggcacctatctcagcgatctgtctatttcgttcatccatagttgcctgactccccgtcgtgtagataactacgatacgggagggcttaccatctggccccagtgctgcaatgataccgcgagacccacgctcaccggctccagatttatcagcaataaaccagccagccggaagggccgagcgcagaagtggtcctgcaactttatccgcctccatccagtctattaattgttgccgggaagctagagtaagtagttcgccagttaatagtttgcgcaacgttgttgccattgctacaggcatcgtggtgtcacgctcgtcgtttggtatggcttcattcagctccggttcccaacgatcaaggcgagttacatgatcccccatgttgtgcaaaaaagcggttagctccttcggtcctccgatagttgtcagaagtaagttggccgcagtgttatcactcatggttatggcagcactgcataattctcttactgtcatgccatccgtaagatgcttttctgtgactggtgagtactcaaccaagtcattctgagaatagtgtatgcggcgaccgagttgctcttgcccggcgtcaatacgggataataccgcgccacatagcagaactttaaaagtgctcatcattggaaaacgttcttcggggcgaaaactctcaaggatcttaccgctgttgagatccagttcgatgtaacccactcgtgcacccaactgatcttcagcatcttttactttcaccagcgtttctgggtgagcaaaaacaggaaggcaaaatgccgcaaaaaagggaataagggcgacacggaaatgttgaatactcatactcttcctttttcaatattattgaagcatttatcagggttattgtctcatgagcggatacatatttgaatgtatttagaaaaataaacaaataggggttccgcgcacatttccccgaaaagtgccacctgacgtctaagaaaccattattatcatgacattaacctataaaaataggcgtatcacgaggccctttcgtctcgcgcgtttcggtgatgacggtgaaaacctctgacacatgcagctcccggagacggtcacagcttgtctgtaagcggatgccgggagcagacaagcccgtcagggcgcgtcagcgggtgttggcgggtgtcggggctggcttaactatgcggcatcagagcagattgtactgagagtgcaccattcgacgctctcccttatgcgactcctgcattaggaagcagcccagtagtaggttgaggccgttgagcaccgccgccgcaaggaatggtctggcttatcgaaattaatacgactcactatagggagacc

SEQ ID NO: 119 - DNA, 6179 bp, synthetic construct
  source 1..6179: mol_type = other DNA
ggaattcgagctcgccccgttacataacttacggtaaatggcccgcctggctgaccgcccaacgacccccgcccattgacgtcaataatgacgtatgttcccatagtaacgccaatagggactttccattgacgtcaatgggtggagtatttacggtaaactgcccacttggcagtacatcaagtgtatcatatgccaagtacgccccctattgacgtcaatgacggtaaatggcccgcctggcattatgcccagtacatgaccttatgggactttcctacttggcagtacatctacgtattagtcatcgctattaccatggtgatgcggttttggcagtacatcaatgggcgtggatagcggtttgactcacggggatttccaagtctccaccccattgacgtcaatgggagtttgttttggcaccaaaatcaacgggactttccaaaatgtcgtaacaactccgccccattgacgcaaatgggcggtaggcgtgtacggtgggaggtctatataagcagagctcgtttagtgaaccgtcagatcgcctggagacgccatccacgctgttttgacctccatagaagacaccgggaccgatccagcctccgggggatcgatccccccgatcctgagaacttcagggtgagtttggggacccttgattgttctttctttttcgctattgtaaaattcatgttatatggagggggcaaagttttcagggtgttgtttagaatgggaagatgtcccttgtatcaccatggaccctcatgataattttgtttctttcactttctactctgttgacaaccattgtctcctcttattttcttttcattttctgtaactttttcgttaaactttagcttgcatttgtaacgaatttttaaattcacttttgtttatttgtcagattgtaagtactttctctaatcacttttttttcaaggcaatcagggtatattatattgtacttcagcacagttttagagaacaattgttataattaaatgataaggtagaatatttctgcatataaattctggctggcgtggaaatattcttattggtagaaacaactacatcctggtcatcatcctgcctttctctttatggttacaatgatatacactgtttgagatgaggataaaatactctgagtccaaaccgggcccctctgctaaccatgttcatgccttcttctttttcctacagctcctgggcaacgtgctggttattgtgctgtctcatcattttggcaaagaattgtaatacgactcactatagggcgaattcggatcccccggtagttaattaatacgcgtcactatgactcccgcatttatcttgtgcatgctcttggcaggcagttcttgggcagcccacatcgtgatggtggatgcctataaaccaacaaagggcagcggcggctccggacgatttactattgtctttcctcaaagtcaaaagggagactggaaagatgtccctccaaattatagatattgtccatctagcgcagaccaaaactggcatggagacttgttaggagttaatatcagagcaaagatgccacaagtgcataaggcaatcaaggctgatggctggatgtgtcatgctgccaagtgggtcacaacatgtgattatagatggtatgggcctcaatacatcacgcactccatccactccttcatccctactaaagctcagtgtgaggaaagcataaagcagactaaggaaggagtttggatcaatccaggatttcccccaaagaactgcggatatgcttcagtaagtgatgctgaatcaattatagtccaagccactgcccactctgtgatgattgatgaatactcaggagactggcttgactctcaattcccaactggtagatgcacgggctccacctgcgaaacaatccacaattctacattgtggtatgccgattatcaagtgaccggcctgtgcgactctgctcttgtctcgacagaagtcactttttactcagaagatggtctaatgacatcaatagggagacagaacacaggttatcgaagtaaccagttcccctatgagaaaggagcagctgcatgtcgaatgaagtactgtacacatgaaggaatccgactgccatcaggtgtgtggtttgaaatggttgacaaggagctgctggagtctgttcaaatgccagaatgcccagctggcctaaccatttcagccccgactcagacctctgttgatgtgagcttgattttggatgtggagcggatgttggactattcattgtgtcaggagacgtggagcaaggttcatagcggattgccaatatctcccgtggatcttggatatatagctccaaaaaacccaggtgctggtcctgctttcacaattgtcaatgggactcttaaatacttcgacacaagatacttgagaattgacatcgagggaccagtccttaagaagatgacaggcaaagtcagtggcaccccgactaagcaggagttgtggactgagtggtttccctatgatgatgtggaaatcggacctaacggagttcttaaaactcctgaaggatacaaatttcctctctacatgatcggacacgggctgctggactcagatcttcaaaagacatcgcaagctgaggtgttccaccatccgcagattgctgaagcagtccaaaagctaccagatgatgagacacttttctttggagacaccgggatttcaaaaaaccccgtggaagtcattgaggggtggttcagcaactggcgcagttctgtcatggcaatagtgttcgccatcttgctgcttgtgatcacagtcttgatggtccgcttatgtgtagcatttcgacatttctgctgccaaaaaagacacaaaatatacaatgatttggaaatgaatcaactacggagataactcaaatcctgctaggtatgaaaaaaactaacagatatcacgcctaggactagtgtgaaatagacatcagaattaagaaaaacgtagggtccaagtggttccccgttatggactcgctatctgtcaaccagatcttataccctgaagttcacctagatagcccgatagttaccaataagatagtagccatcctggagtatgctcgactgtttaaacctgcaggcatgcaagctgatctttttccctctgccaaaaattatggggacatcatgaagccccttgagcatctgacttctggctaataaaggaaatttattttcattgcaatagtgtgttggaattttttgtgtctctcactcggaaggacatatgggagggcaaatcatttaaaacatcagaatgagtatttggtttagagtttggcaacatatgcccatatgctggctgccatgaacaaaggttggctataaagaggtcatcagtatatgaaacagccccctgctgtccattccttattccatagaaaagccttgacttgaggttagattttttttatattttgttttgtgttatttttttctttaacatccctaaaattttccttacatgttttactagccagatttttcctcctctcctgactactcccagtcatagctgtccctcttctcttatggagatccctcgaggagctttttgcaaaagcctaggcctccaaaaaagcctcttcactacttctggaatagctcagaagccgaggcggcctcggcctctgcataaataaaaaaaattagtcagccatggggcggagaatgggcggaactgggcggagttaggggcgggatgggcggagttaggggcgggactatggttgctgactaattgctgcattaatgaatcggccaacgcgcggggagaggcggtttgcgtattgggcgctcttccgcttcctcgctcactgactcgctgcgctcggtcgttcggctgcggcgagcggtatcagctcactcaaaggcggtaatacggttatccacagaatcaggggataacgcaggaaagaacatgtgagcaaaaggccagcaaaaggccaggaaccgtaaaaaggccgcgttgctggcgtttttccataggctccgcccccctgacgagcatcacaaaaatcgacgctcaagtcagaggtggcgaaacccgacaggactataaagataccaggcgtttccccctggaagctccctcgtgcgctctcctgttccgaccctgccgcttaccggatacctgtccgcctttctcccttcgggaagcgtggcgctttctcatagctcacgctgtaggtatctcagttcggtgtaggtcgttcgctccaagctgggctgtgtgcacgaaccccccgttcagcccgaccgctgcgccttatccggtaactatcgtcttgagtccaacccggtaagacacgacttatcgccactggcagcagccactggtaacaggattagcagagcgaggtatgtaggcggtgctacagagttcttgaagtggtggcctaactacggctacactagaagaacagtatttggtatctgcgctctgctgaagccagttaccttcggaaaaagagttggtagctcttgatccggcaaacaaaccaccgctggtagcggtggtttttttgtttgcaagcagcagattacgcgcagaaaaaaaggatctcaagaagatcctttgatcttttctacggggtctgacgctcagtggaacgaaaactcacgttaagggattttggtcatgagattatcaaaaaggatcttcacctagatccttttaaattaaaaatgaagttttaaatcaatctaaagtatatatgagtaaacttggtctgacagttaccaatgcttaatcagtgaggcacctatctcagcgatctgtctatttcgttcatccatagttgcctgactccccgtcgtgtagataactacgatacgggagggcttaccatctggccccagtgctgcaatgataccgcgagacccacgctcaccggctccagatttatcagcaataaaccagccagccggaagggccgagcgcagaagtggtcctgcaactttatccgcctccatccagtctattaattgttgccgggaagctagagtaagtagttcgccagttaatagtttgcgcaacgttgttgccattgctacaggcatcgtggtgtcacgctcgtcgtttggtatggcttcattcagctccggttcccaacgatcaaggcgagttacatgatcccccatgttgtgcaaaaaagcggttagctccttcggtcctccgatagttgtcagaagtaagttggccgcagtgttatcactcatggttatggcagcactgcataattctcttactgtcatgccatccgtaagatgcttttctgtgactggtgagtactcaaccaagtcattctgagaatagtgtatgcggcgaccgagttgctcttgcccggcgtcaatacgggataataccgcgccacatagcagaactttaaaagtgctcatcattggaaaacgttcttcggggcgaaaactctcaaggatcttaccgctgttgagatccagttcgatgtaacccactcgtgcacccaactgatcttcagcatcttttactttcaccagcgtttctgggtgagcaaaaacaggaaggcaaaatgccgcaaaaaagggaataagggcgacacggaaatgttgaatactcatactcttcctttttcaatattattgaagcatttatcagggttattgtctcatgagcggatacatatttgaatgtatttagaaaaataaacaaataggggttccgcgcacatttccccgaaaagtgccacctgacgtctaagaaaccattattatcatgacattaacctataaaaataggcgtatcacgaggccctttcgtctcgcgcgtttcggtgatgacggtgaaaacctctgacacatgcagctcccggagacggtcacagcttgtctgtaagcggatgccgggagcagacaagcccgtcagggcgcgtcagcgggtgttggcgggtgtcggggctggcttaactatgcggcatcagagcagattgtactgagagtgcaccattcgacgctctcccttatgcgactcctgcattaggaagcagcccagtagtaggttgaggccgttgagcaccgccgccgcaaggaatggtctggcttatcgaaattaatacgactcactatagggagacc

SEQ ID NO: 120 - DNA, 6215 bp, synthetic construct
  source 1..6215: mol_type = other DNA
ggaattcgagctcgccccgttacataacttacggtaaatggcccgcctggctgaccgcccaacgacccccgcccattgacgtcaataatgacgtatgttcccatagtaacgccaatagggactttccattgacgtcaatgggtggagtatttacggtaaactgcccacttggcagtacatcaagtgtatcatatgccaagtacgccccctattgacgtcaatgacggtaaatggcccgcctggcattatgcccagtacatgaccttatgggactttcctacttggcagtacatctacgtattagtcatcgctattaccatggtgatgcggttttggcagtacatcaatgggcgtggatagcggtttgactcacggggatttccaagtctccaccccattgacgtcaatgggagtttgttttggcaccaaaatcaacgggactttccaaaatgtcgtaacaactccgccccattgacgcaaatgggcggtaggcgtgtacggtgggaggtctatataagcagagctcgtttagtgaaccgtcagatcgcctggagacgccatccacgctgttttgacctccatagaagacaccgggaccgatccagcctccgggggatcgatccccccgatcctgagaacttcagggtgagtttggggacccttgattgttctttctttttcgctattgtaaaattcatgttatatggagggggcaaagttttcagggtgttgtttagaatgggaagatgtcccttgtatcaccatggaccctcatgataattttgtttctttcactttctactctgttgacaaccattgtctcctcttattttcttttcattttctgtaactttttcgttaaactttagcttgcatttgtaacgaatttttaaattcacttttgtttatttgtcagattgtaagtactttctctaatcacttttttttcaaggcaatcagggtatattatattgtacttcagcacagttttagagaacaattgttataattaaatgataaggtagaatatttctgcatataaattctggctggcgtggaaatattcttattggtagaaacaactacatcctggtcatcatcctgcctttctctttatggttacaatgatatacactgtttgagatgaggataaaatactctgagtccaaaccgggcccctctgctaaccatgttcatgccttcttctttttcctacagctcctgggcaacgtgctggttattgtgctgtctcatcattttggcaaagaattgtaatacgactcactatagggcgaattcggatcccccggtagttaattaatacgcgtcactatgaagatgaaaatggtcatagcaggattaatcctttgtatagggattttaccggctattggggcccacatcgtgatggtggatgcctataaaccaacaaagggcagcggcggctccggacgaataacaatttctttcccacaaagcttgaaaggagattggaggcctgtaccgaagggatacaattattgtcctacaagtgcggataaaaatctccatggtgatttgattgacataggtctcagacttcgggcccctcagagcttcaaagggatctccgcagatggatggatgtgccatgcggcaagatggatcaccacctgtgatttcagatggtatggacccaagtacatcacccactcaattcactctttcaggccgagcaatgaccaatgcaaagaagcaatccggctgactaatgaagggaattggattaatccaggtttccctccgcaatcttgcggatatgcttctgtaaccgactcagaatccgttgtcgtaaccgtgaccaagcaccaggtcctagtagatgagtactccggctcatggatcgatagtcaattccccggaggaagttgcacatcccccatttgcgatacagtgcacaactcgacactttggcacgcggaccacaccctggacagtatctgtgaccaagaattcgtggcaatggacgcagttctgttcacagagagtggcaaatttgaagagttcggaaaaccgaactccggcatcaggagcaaccagtttccttatgagagtctgaaagatgtatgtcagatggatttctgcaagaggaaaggattcaagctcccatccggtgtctggtttgaaatcgaggatgcagagaaatctcacaaggcccaggttgaattgaaaataaaacggtgccctcatggagcagtaatctcagctcctaatcagaatgcagcagatatcaatctgatcatggatgtggaacgaattctagactactccctttgccaagcaacttggagcaaaatccaaaacaaggaagcgttgacccccatcgatatcagttatcttggtccgaaaaacccaggaccaggcccagccttcaccataataaatggaacactgcactacttcaatactagatacattcgagtggatattgcagggcctgttaccaaagagattacaggatttgtttcgggaacatctacatctcaggtgctgtgggatcagtggttcccatatggagagaattccattggacccaatggcttgctgaaaaccgccagcggatacaaatatccattgttcatggttggtacaggtgtgctggatgcggacatccacaagctgggagaagcaaccgtgattgaacatccacatgccaaagaggctcagaaggtagttgatgacagtgaggttatattttttggtgacaccggagtctccaagaatccagtggaggtagtcgaaggatggtttagcggatggagaagctctttgatgagcatatttggcataattttgttgattgtttgtttagtcttgattgttcgaatccttatagcccttaaatactgttgtgttagacacaaaaagagaactatttacaaagaggaccttgaaatgggtcgaattcctcggagggcttaactcaaatcctgctaggtatgaaaaaaactaacagatatcacgcctaggactagtgtgaaatagacatcagaattaagaaaaacgtagggtccaagtggttccccgttatggactcgctatctgtcaaccagatcttataccctgaagttcacctagatagcccgatagttaccaataagatagtagccatcctggagtatgctcgactgtttaaacctgcaggcatgcaagctgatctttttccctctgccaaaaattatggggacatcatgaagccccttgagcatctgacttctggctaataaaggaaatttattttcattgcaatagtgtgttggaattttttgtgtctctcactcggaaggacatatgggagggcaaatcatttaaaacatcagaatgagtatttggtttagagtttggcaacatatgcccatatgctggctgccatgaacaaaggttggctataaagaggtcatcagtatatgaaacagccccctgctgtccattccttattccatagaaaagccttgacttgaggttagattttttttatattttgttttgtgttatttttttctttaacatccctaaaattttccttacatgttttactagccagatttttcctcctctcctgactactcccagtcatagctgtccctcttctcttatggagatccctcgaggagctttttgcaaaagcctaggcctccaaaaaagcctcttcactacttctggaatagctcagaagccgaggcggcctcggcctctgcataaataaaaaaaattagtcagccatggggcggagaatgggcggaactgggcggagttaggggcgggatgggcggagttaggggcgggactatggttgctgactaattgctgcattaatgaatcggccaacgcgcggggagaggcggtttgcgtattgggcgctcttccgcttcctcgctcactgactcgctgcgctcggtcgttcggctgcggcgagcggtatcagctcactcaaaggcggtaatacggttatccacagaatcaggggataacgcaggaaagaacatgtgagcaaaaggccagcaaaaggccaggaaccgtaaaaaggccgcgttgctggcgtttttccataggctccgcccccctgacgagcatcacaaaaatcgacgctcaagtcagaggtggcgaaacccgacaggactataaagataccaggcgtttccccctggaagctccctcgtgcgctctcctgttccgaccctgccgcttaccggatacctgtccgcctttctcccttcgggaagcgtggcgctttctcatagctcacgctgtaggtatctcagttcggtgtaggtcgttcgctccaagctgggctgtgtgcacgaaccccccgttcagcccgaccgctgcgccttatccggtaactatcgtcttgagtccaacccggtaagacacgacttatcgccactggcagcagccactggtaacaggattagcagagcgaggtatgtaggcggtgctacagagttcttgaagtggtggcctaactacggctacactagaagaacagtatttggtatctgcgctctgctgaagccagttaccttcggaaaaagagttggtagctcttgatccggcaaacaaaccaccgctggtagcggtggtttttttgtttgcaagcagcagattacgcgcagaaaaaaaggatctcaagaagatcctttgatcttttctacggggtctgacgctcagtggaacgaaaactcacgttaagggattttggtcatgagattatcaaaaaggatcttcacctagatccttttaaattaaaaatgaagttttaaatcaatctaaagtatatatgagtaaacttggtctgacagttaccaatgcttaatcagtgaggcacctatctcagcgatctgtctatttcgttcatccatagttgcctgactccccgtcgtgtagataactacgatacgggagggcttaccatctggccccagtgctgcaatgataccgcgagacccacgctcaccggctccagatttatcagcaataaaccagccagccggaagggccgagcgcagaagtggtcctgcaactttatccgcctccatccagtctattaattgttgccgggaagctagagtaagtagttcgccagttaatagtttgcgcaacgttgttgccattgctacaggcatcgtggtgtcacgctcgtcgtttggtatggcttcattcagctccggttcccaacgatcaaggcgagttacatgatcccccatgttgtgcaaaaaagcggttagctccttcggtcctccgatagttgtcagaagtaagttggccgcagtgttatcactcatggttatggcagcactgcataattctcttactgtcatgccatccgtaagatgcttttctgtgactggtgagtactcaaccaagtcattctgagaatagtgtatgcggcgaccgagttgctcttgcccggcgtcaatacgggataataccgcgccacatagcagaactttaaaagtgctcatcattggaaaacgttcttcggggcgaaaactctcaaggatcttaccgctgttgagatccagttcgatgtaacccactcgtgcacccaactgatcttcagcatcttttactttcaccagcgtttctgggtgagcaaaaacaggaaggcaaaatgccgcaaaaaagggaataagggcgacacggaaatgttgaatactcatactcttcctttttcaatattattgaagcatttatcagggttattgtctcatgagcggatacatatttgaatgtatttagaaaaataaacaaataggggttccgcgcacatttccccgaaaagtgccacctgacgtctaagaaaccattattatcatgacattaacctataaaaataggcgtatcacgaggccctttcgtctcgcgcgtttcggtgatgacggtgaaaacctctgacacatgcagctcccggagacggtcacagcttgtctgtaagcggatgccgggagcagacaagcccgtcagggcgcgtcagcgggtgttggcgggtgtcggggctggcttaactatgcggcatcagagcagattgtactgagagtgcaccattcgacgctctcccttatgcgactcctgcattaggaagcagcccagtagtaggttgaggccgttgagcaccgccgccgcaaggaatggtctggcttatcgaaattaatacgactcactatagggagacc

SEQ ID NO: 121 - protein, 16 aa, synthetic construct
MLSYLILAIIVSPILG

SEQ ID NO: 122 - protein, 17 aa, synthetic construct
MTPAFILCMLLAGSSWA

SEQ ID NO: 123 - protein, 21 aa, synthetic construct
MKMKMVIAGLILCIGILPAIG

SEQ ID NO: 124 - protein, 494 aa, synthetic construct
RFTIVFPQSQKGDWKDVPPNYRYCPSSADQNWHGDLLGVNIRAKMPKVHKAIKADGWMCHAAKWVTTCDYRWYGPQYITHSIHSFIPTKAQCEESIKQTKEGVWINPGFPPKNCGYASVSDAESIIVQATAHSVMIDEYSGDWLDSQFPTGRCTGSTCETIHNSTLWYADYQVTGLCDSALVSTEVTFYSEDGLMTSIGRQNTGYRSNYFPYEKGAAACRMKYCTHEGIRLPSGVWFEMVDKELLESVQMPECPAGLTISAPTQTSVDVSLILDVERMLDYSLCQETWSKVHSGLPISPVDLGYIAPKNPGAGPAFTIVNGTLKYFDTRYLRIDIEGPVLKKMTGKVSGTPTKRELWTEWFPYDDVEIGPNGVLKTPEGYKFPLYMIGHGLLDSDLQKTSQAEVFHHPQIAEAVQKLPDDETLFFGDTGISKNPVEVIEGWFSNWRSSVMAIVFAILLLVITVLMVRLCVAFRHFCCQKRHKIYNDLEMNQLRR

SEQ ID NO: 125 - protein, 494 aa, synthetic construct
KFTIVFPQSQKGDWKDVPPNYRYCPSSADQNWHGDLLGVNIRAKMPKVHKAIKADGWMCHAAKWVTTCDYRWYGPQYITHSIHSFIPTKAQCEESIKQTKEGVWINPGFPPKNCAYASVSDAESIIVQATAHSVMIDEYSGDWLDSQFPTGRCTGSTCETIHNSTLWYADYQVTGLCDSALVSTEVTFYSEDGLMTSIGRQNTGYRSNYFPYEKGAAACRMKYCTHEGIRLPSGVWFEMVDKELLESVQMPECPAGLTISAPTQTSVDVSLILDVERMLDYSLCQETWSKVHSGLPISPVDLGYIAPKNPGAGPAFTIVNGTLKYFDTRYLRIDIEGPVLKKMTGKVSGTPTKRELWTEWFPYDDVEIGPNGVLKTPEGYKFPLYMIGHGLLDSDLQKTSQAEVFHHPQIAEAVQKLPDDETLFFGDTGISKNPVEVIEGWFSNWRSSVMAIVFAILLLVITVLMVRLCVAFRHFCCQKRHKIYNDLEMNQLRR

SEQ ID NO: 126 - protein, 502 aa, synthetic construct
RITISFPQSLKGDWRPVPKGYNYCPTSADKNLHGDLIDIGLRLRAPKSFKGISADGWMCHAARWITTCDFRWYGPKYITHSIHSFRPSNDQCKEAIRLTNEGNWINPGFPPQSCGYASVTDSESVVVTVTKHQVLVDEYSGSWIDSQFPGGSCTSPICDTVHNSTLWHADHTLDSICDQEFVAMDAVLFTESGKFEEFGKPNSGIRSNYFPYESLKDVCQMDFCKRKGFKLPSGVWFEIEDAEKSHKAQVELKIKRCPHGAVISAPNQNAADINLIMDVERILDYSLCQATWSKIQNKEALTPIDISYLGPKNPGPGPAFTIINGTLHYFNTRYIRVDIAGPVTKEITGFVSGTSTSRVLWDQWFPYGENSIGPNGLLKTASGYKYPLFMVGTGVLDADIHKLGEATVIEHPHAKEAQKVVDDSEVIFFGDTGVSKNPVEVVEGWFSGWRSSLMSIFGIILLIVCLVLIVRILIALKYCCVRHKKRTIYKEDLEMGRIPRRA

SEQ ID NO: 127 - protein, 502 aa, synthetic construct
KITISFPQSLKGDWRPVPKGYNYCPTSADKNLHGDLIDIGLRLRAPKSFKGISADGWMCHAARWITTCDFRWYGPKYITHSIHSFRPSNDQCKEAIRLTNEGNWINPGFPPQSCAYASVTDSESVVVTVTKHQVLVDEYSGSWIDSQFPGGSCTSPICDTVHNSTLWHADHTLDSICDQEFVAMDAVLFTESGKFEEFGKPNSGIRSNYFPYESLKDVCQMDFCKRKGFKLPSGVWFEIEDAEKSHKAQVELKIKRCPHGAVISAPNQNAADINLIMDVERILDYSLCQATWSKIQNKEALTPIDISYLGPKNPGPGPAFTIINGTLHYFNTRYIRVDIAGPVTKEITGFVSGTSTSRVLWDQWFPYGENSIGPNGLLKTASGYKYPLFMVGTGVLDADIHKLGEATVIEHPHAKEAQKVVDDSEVIFFGDTGVSKNPVEVVEGWFSGWRSSLMSIFGIILLIVCLVLIVRILIALKYCCVRHKKRTIYKEDLEMGRIPRRA

SEQ ID NO: 128 - protein, 495 aa, Vesiculovirus cocal
KFSIVFPQSQKGNWKNVPSSYHYCPSSSDQNWHNDLLGITMKVKMPKTHKAIQADGWMCHAAKWITTCDFRWYGPKYITHSIHSIQPTSEQCKESIKQTKQGTWMSPGFPPQNCGYATVTDSVAVVVQATPHHVLVDEYTGEWIDSQFPNGKCETEECETVHNSTVWYSDYKVTGLCDATLVDTEITFFSEDGKKESIGKPNTGYRSNYFAYEKGDKVCKMNYCKHAGVRLPSGVWFEFVDQDVYAAAKLPECPVGATISAPTQTSVDVSLILDVERILDYSLCQETWSKIRSKQPVSPVDLSYLAPKNPGTGPAFTIINGTLKYFETRYIRIDIDNPIISKMVGKISGSQTERELWTEWFPYEGVEIGPNGILKTPTGYKFPLFMIGHGMLDSDLHKTSQAEVFEHPHLAEAPKQLPEEETLFFGDTGISKNPVELIEGWFSSWKSTVVTFFFAIGVFILLYVVARIVIAVRYRYQGSNNKRIYNDIEMSRFRK

SEQ ID NO: 129 - protein, 501 aa, Vesiculovirus newjersey
KIEIVFPQHTTGDWKRVPHEYNYCPTSADKNSHGTQTGIPVELTMPKGLTTHQVDGFMCHSALWMTTCDFRWYGPKYITHSIHNEEPTDYQCLEAIKAYKDGVSFNPGFPPQSCGYGTVTDAEAHIVTVTPHSVKVDEYTGEWIDPHFIGGRCKGQICETVHNSTKWFTSSDGESVCSQLFTLVGGTFFSDSEEITSMGLPETGIRSNYFPYVSTEGICKMPFCRKPGYKLKNDLWFQITDPDLDKTVRDLPHIKDCDLSSSIVTPGEHATDISLISDVERILDYALCQNTWSKIEAGEPITPVDLSYLGPKNPGAGPVFTIINGSLHYFMSKYLRVELESPVIPRMEGKVAGTRIVRQLWDQWFPFGEVEIGPNGVLKTKQGYKFPLHIIGTGEVDNDIKMERIVKHWEHPHIEAAQTFLKKDDTEEVLYYGDTGVSKNPVELVEGWFSGWRSSIMGVLAVIIGFVILIFLIRLIGVLSSLFRQKRRPIYKSDVEMAHFR

SEQ ID NO: 130 - protein, 19 aa, synthetic construct
AAASGGSGGGGSGGGGSGP

SEQ ID NO: 131 - protein, 17 aa, synthetic construct
AAASGGSGGGGSGGGGS

SEQ ID NO: 132 - protein, 20 aa, synthetic construct
GGGGSGGGGSGGGGSGGGGS

SEQ ID NO: 133 - protein, 10 aa, synthetic construct
GGGGSGGGGS

SEQ ID NO: 134 - protein, 5 aa, synthetic construct
GGGGS

SEQ ID NO: 135 - protein, 8 aa, synthetic construct
GGGGGGGG

SEQ ID NO: 136 - protein, 6 aa, synthetic construct
GGGGGG

SEQ ID NO: 137 - protein, 12 aa, synthetic construct
GSAGSAAGSGEF

SEQ ID NO: 138 - protein, 10 aa, synthetic construct
VPGVGVPGVG

SEQ ID NO: 139 - protein, 5 aa, synthetic construct
PAPAP

SEQ ID NO: 140 - protein, 15 aa, synthetic construct
EAAAKEAAAKEAAAK

SEQ ID NO: 141 - protein, 10 aa, synthetic construct
EAAAKEAAAK

SEQ ID NO: 142 - protein, 5 aa, synthetic construct
EAAAK

SEQ ID NO: 143 - protein, 46 aa, synthetic construct
AEAAAKEAAAKEAAAKEAAAKALEAEAAAKEAAAKEAAAKEAAAKA

SEQ ID NO: 144 - protein, 12 aa, synthetic construct
AEAAAKEAAAKA

SEQ ID NO: 145 - protein, 12 aa, synthetic construct
ESKYGPPCPPCP

SEQ ID NO: 146 - protein, 16 aa, synthetic construct
CPPCPAPELLGGPSVF

SEQ ID NO: 147 - protein, 10 aa, synthetic construct
  REGION 9..10: note = The sequence of AP can be repeated one to twelve times
APAPAPAPAP

SEQ ID NO: 148 - protein, 21 aa, synthetic construct
MALPVTALLLPLALLLHAARP

SEQ ID NO: 149 - protein, 45 aa, synthetic construct
TTTPAPRPPTPAPTIASQPLSLRPEACRPAAGGAVHTRGLDFACD

SEQ ID NO: 150 - protein, 24 aa, synthetic construct
IYIWAPLAGTCGVLLLSLVITLYC

SEQ ID NO: 151 - protein, 42 aa, synthetic construct
KRGRKKLLYIFKQPFMRPVQTTQEEDGCSCRFPEEEEGGCEL

SEQ ID NO: 152 - protein, 112 aa, synthetic construct
RVKFSRSADAPAYKQGQNQLYNELNLGRREEYDVLDKRRGRDPEMGGKPRRKNPQEGLYNELQKDKMAEAYSEIGMKGERRRGKGHDGLYQGLSTATKDTYDALHMQALPPR

SEQ ID NO: 153 - protein, 239 aa, synthetic construct
MVSKGEELFTGVVPILVELDGDVNGHKFSVSGEGEGDATYGKLTLKFICTTGKLPVPWPTLVTTLTYGVQCFARYPDHMKQHDFFKSAMPEGYVQERTIFFKDDGNYKTRAEVKFEGDTLVNRIELKGIDFKEDGNILGHKLEYNYNSHKVYITADKQKNGIKVNFKTRHNIEDGSVQLADHYQQNTPIGDGPVLLPDNHYLSTQSALSKDPNEKRDHMVLLEFVTAAGITLGMDELYK

SEQ ID NO: 154 - protein, 196 aa, synthetic construct
NQPLDYKICERLTGILNYVAPFTLCGYAALMPLYHAIASRMAFIFSSLYKSWLLSLYEELWPVVRQRGVVCTVFADATPTGWGIATTCQLLSGTFAFPLPIATAELIAACLARCWTGARLLGTDNSVVLSGKSSSFPWLLACVATWILRGTSFCYVPSALNPADLPSRGLLPALRPLPRLRLRPQTSRISLWAASP

SEQ ID NO: 155 - protein, 107 aa, synthetic construct
DIQMTQTTSSLSASLGDRVTISCRASQDISKYLNWYQQKPDGTVKLLIYHTSRLHSGVPSRFSGSGSGTDYSLTISNLEQEDIATYFCQQGNTLPYTFGGGTKLEIT

SEQ ID NO: 156 - protein, 120 aa, synthetic construct
EVKLQESGPGLVAPSQSLSVTCTVSGVSLPDYGVSWIRQPPRKGLEWLGVIWGSETTYYNSALKSRLTIIKDNSKSQVFLKMNSLQTDDTAIYYCAKHYYYGGSYAMDYWGQGTSVTVSS

SEQ ID NO: 157 - protein, 119 aa, synthetic construct
AVQLVESGGGLVQAGDSLRLTCTASGRAFSTYFMAWFRQAPGKEREFVAGIAWSGGSTAYADSVKGRFTISRDNAKNTVYLQMNSLKSEDTAVYYCASRGIEVEEFGAWGQGTQVTVSS

SEQ ID NO: 158 - protein, 121 aa, synthetic construct
EVQLLESGGGLVQPGGSLRLSCAASGFTFSSYAMSWVRQAPGKGLEWVSSISGSGDYIYYADSVKGRFTISRDISKNTLYLQMNSLRAEDTAVYYCAKEGTGANSSLADYRGQGTLVTVSS

SEQ ID NO: 159 - protein, 119 aa, synthetic construct
QVKLEESGGGLVQAGRSLRLSCAASEHTFSSHVMGWFRQAPGKERESVAVIGWRDISTSYADSVKGRFTISRDNAKKTLYLQMNSLKPEDTAVYYCAARRIDAADFDSWGQGTQVTVSS

SEQ ID NO: 160 - protein, 118 aa, synthetic construct
EVQLVESGGGLVQAGGSLRLSCAASGRTFTMGWFRQAPGKEREFVAAISLSPTLAYYAESVKGRFTISRDNAKNTVVLQMNSLKPEDTALYYCAADRKSVMSIRPDYWGQGTQVTVSS

SEQ ID NO: 161 - protein, 104 aa, synthetic construct
QSALTQPASVSASPGQSIAISCTGTSSDVGWYQQHPGKAPKLMIYEDSKRPSGVSNRFSGSKSGNTASLTISGLQAEDEADYYCSSNTRSSTLVFGGGTKLTVL

SEQ ID NO: 162 - protein, 118 aa, synthetic construct
EVQLVQSGAEMKKPGASLKLSCKASGYTFIDYYVYWMRQAPGQGLESMGWINPNSGGTNYAQKFQGRVTMTRDTSISTAYMELSRLRSDDTAMYYCARSQRDGYMDYWGQGTLVTVSS

SEQ ID NO: 163 - protein, 108 aa, synthetic construct
SYVLTQPPSVSVAPGQTARITCGGNNIGSKSVHWYQQPPGQAPVVVVYDDSDRPSGIPERFSGSNSGNTATLTISRVEAGDEAVYYCQVWDSSSDHVVFGGGTKLTVL

SEQ ID NO: 164 - protein, 121 aa, synthetic construct
QLQLQESGPGLVKPSETLSLTCTVSGGSISSGSYFWGWIRQPPGKGLEWIGSIYYSGITYYNPSLKSRVTISVDTSKNQFSLKLSSVTAADTAVYYCARHDGAVAGLFDYWGQGTLVTVSS

SEQ ID NO: 165 - DNA, 11379 bp, synthetic construct
  source 1..11379: mol_type = other DNA
ggaagggctaattcactcccaaagaagacaagatatccttgatctgtggatctaccacacacaaggctacttccctgattagcagaactacacaccagggccaggggtcagatatccactgacctttggatggtgctacaagctagtaccagttgagccagataaggtagaagaggccaataaaggagagaacaccagcttgttacaccctgtgagcctgcatgggatggatgacccggagagagaagtgttagagtggaggtttgacagccgcctagcatttcatcacgtggcccgagagctgcatccggagtacttcaagaactgctgatatcgagcttgctacaagggactttccgctggggactttccagggaggcgtggcctgggcgggactggggagtggcgagccctcagatcctgcatataagcagctgctttttgcctgtactgggtctctctggttagaccagatctgagcctgggagctctctggctaactagggaacccactgcttaagcctcaataaagcttgccttgagtgcttcaagtagtgtgtgcccgtctgttgtgtgactctggtaactagagatccctcagacccttttagtcagtgtggaaaatctctagcagtggcgcccgaacagggacttgaaagcgaaagggaaaccagaggagctctctcgacgcaggactcggcttgctgaagcgcgcacggcaagaggcgaggggcggcgactggtgagtacgccaaaaattttgactagcggaggctagaaggagagagatgggtgcgagagcgtcagtattaagcgggggagaattagatcgcgatgggaaaaaattcggttaaggccagggggaaagaaaaaatataaattaaaacatatagtatgggcaagcagggagctagaacgattcgcagttaatcctggcctgttagaaacatcagaaggctgtagacaaatactgggacagctacaaccatcccttcagacaggatcagaagaacttagatcattatataatacagtagcaaccctctattgtgtgcatcaaaggatagagataaaagacaccaaggaagctttagacaagatagaggaagagcaaaacaaaagtaagaccaccgcacagcaagcggccggccgctgatcttcagacctggacgatatatatgagggacaattggagaagtgaattatataaatataaagtagtaaaaattgaaccattaggagtagcacccaccaaggcaaagagaagagtggtgcagagagaaaaaagagcagtgggaataggagctttgttccttgggttcttgggagcagcaggaagcactatgggcgcagcgtcaatgacgctgacggtacaggccagacaattattgtctggtatagtgcagcagcagaacaatttgctgagggctattgaggcgcaacagcatctgttgcaactcacagtctggggcatcaagcagctccaggcaagaatcctggctgtggaaagatacctaaaggatcaacagctcctggggatttggggttgctctggaaaactcatttgcaccactgctgtgccttggaatgctagttggagtaataaatctctggaacagatttggaatcacacgacctggatggagtgggacagagaaattaacaattacacaagcttaatacactccttaattgaagaatcgcaaaaccagcaagaaaagaatgaacaagaattattggaattagataaatgggcaagtttgtggaattggtttaacataacaaattggctgtggtatataaaattattcataatgatagtaggaggcttggtaggtttaagaatagtttttgctgtactttctatagtgaatagagttaggcagggatattcaccattatcgtttcagacccacctcccaaccccgaggggacccgacaggcccgaaggaatagaagaagaaggtggagagagagacagagacagatccattcgattagtgaacggatctcgacggtatcgccaaatggcagtattcatccacaattttaaaagaaaaggggggattggggggtacagtgcaggggaaagaatagtagacataatagcaacagacatacaaactaaagaattacaaaaacaaattacaaaaattcaaaattttcgggtttattacagggacagcagagatccagtttggatcgataagcttgatatcgaattcgagtcaatgggaaaaacccattggagccaagtacactgactcaatagggactttccattgggttttgcccagtacataaggtcaatagggggtgagtcaacaggaaagtcccattggagccaagtacattgagtcaatagggactttccaatgggttttgcccagtacataaggtcaatgggaggtaagccaatgggtttttcccattactgacatgtatactgagtcattagggactttccaatgggttttgcccagtacataaggtcaataggggtgaatcaacaggaaagtcccattggagccaagtacactgagtcaatagggactttccattgggttttgcccagtacaaaaggtcaatagggggtgagtcaatgggtttttcccattattggcacatacataaggtcaataggggtgactagtggagaagagcatgcttgagggctgagtgcccctcagtgggcagagagcacatggcccacagtccctgagaagttggggggaggggtgggcaattgaactggtgcctagagaaggtggggcttgggtaaactgggaaagtgatgtggtgtactggctccacctttttccccagggtgggggagaaccatatataagtgcagtagtctctgtgaacattcaagcttctgccttctccctcctgtgagtttgggatccgccatggccttaccagtgaccgccttgctcctgccgctggccttgctgctccacgccgccaggccggacatccagatgacacagactacatcctccctgtctgcctctctgggagacagagtcaccatcagttgcagggcaagtcaggacattagtaaatatttaaattggtatcagcagaaaccagatggaactgttaaactcctgatctaccatacatcaagattacactcaggagtcccatcaaggttcagtggcagtgggtctggaacagattattctctcaccattagcaacctggagcaagaagatattgccacttacttttgccaacagggtaatacgcttccgtacacgttcggaggggggaccaagctggagatcacaggtggcggtggctcgggcggtggtgggtcgggtggcggcggatctgaggtgaaactgcaggagtcaggacctggcctggtggcgccctcacagagcctgtccgtcacatgcactgtctcaggggtctcattacccgactatggtgtaagctggattcgccagcctccacgaaagggtctggagtggctgggagtaatatggggtagtgaaaccacatactataattcagctctcaaatccagactgaccatcatcaaggacaactccaagagccaagttttcttaaaaatgaacagtctgcaaactgatgacacagccatttactactgtgccaaacattattactacggtggtagctatgctatggactactggggccaaggaacctcagtcaccgtctcctcaactacgactccagcaccacgaccaccaacaccagcgcccaccattgcaagccagccactttcactgcgcccagaagcgtgtagaccagctgctggaggagcagtgcatacgagagggctggacttcgcctgtgatatctacatctgggcgcccttggccgggacttgtggggtccttctcctgtcactggttatcaccctttactgcaaacggggcagaaagaaactcctgtatatattcaaacaaccatttatgagaccagtacaaactactcaagaggaagatggctgtagctgccgatttccagaagaagaagaaggaggatgtgaactgagagtgaagttcagcaggagcgcagacgcccccgcgtacaagcagggccagaaccagctctataacgagctcaatctaggacgaagagaggagtacgatgttttggacaagagacgtggccgggaccctgagatggggggaaagccgagaaggaagaaccctcaggaaggcctgtacaatgaactgcagaaagataagatggcggaggcctacagtgagattgggatgaaaggcgagcgccggaggggcaaggggcacgatggcctttaccagggtctcagtacagccaccaaggacacctacgacgcccttcacatgcaggccctgccccctcgcgtcggaagcggagctactaacttcagcctgctgaagcaggctggagacgtggaagagaaccctggacctagatccatggccacaaccatggtgagcaagggcgaggagctgttcaccggggtggtgcccatcctggtcgagctggacggcgacgtaaacggccacaagttcagcgtgtccggcgagggcgagggcgatgccacctacggcaagctgaccctgaagttcatctgcaccaccggcaagctgcccgtgccctggcccaccctcgtgaccaccttgacctacggcgtgcagtgcttcgcccgctaccccgaccacatgaagcagcacgacttcttcaagtccgccatgcccgaaggctacgtccaggagcgcaccatcttcttcaaggacgacggcaactacaagacccgcgccgaggtgaagttcgagggcgacaccctggtgaaccgcatcgagctgaagggcatcgacttcaaggaggacggcaacatcctggggcacaagctggagtacaactacaacagccacaaggtctatatcaccgccgacaagcagaagaacggcatcaaggtgaacttcaagacccgccacaacatcgaggacggcagcgtgcagctcgccgaccactaccagcagaacacccccatcggcgacggccccgtgctgctgcccgacaaccactacctgagcacccagtccgccctgagcaaagaccccaacgagaagcgcgatcacatggtcctgctggagttcgtgaccgccgccgggatcactctcggcatggacgagctgtacaagtaagcggccgcgactctagagtcgacctgcaggcatgcaagcttgatatcaagcttatcgataatcaacctctggattacaaaatttgtgaaagattgactggtattcttaactatgttgctccttttacgctatgtggatacgctgctttaatgcctttgtatcatgctattgcttcccgtatggctttcattttctcctccttgtataaatcctggttgctgtctctttatgaggagttgtggcccgttgtcaggcaacgtggcgtggtgtgcactgtgtttgctgacgcaacccccactggttggggcattgccaccacctgtcagctcctttccgggactttcgctttccccctccctattgccacggcggaactcatcgccgcctgccttgcccgctgctggacaggggctcggctgttgggcactgacaattccgtggtgttgtcggggaaatcatcgtcctttccttggctgctcgcctgtgttgccacctggattctgcgcgggacgtccttctgctacgtcccttcggccctcaatccagcggaccttccttcccgcggcctgctgccggctctgcggcctcttccgcgtcttcgccttcgccctcagacgagtcggatctccctttgggccgcctccccgcatcgataccgtcgacctcgatcgagggaattaattcgagctcggtacctttaagaccaatgacttacaaggcagctgtagatcttagccactttttaaaagaaaaggggggactggaagggctaattcactcccaacgaagacaagatctgctttttgcttgtactgggtctctctggttagaccagatctgagcctgggagctctctggctaactagggaacccactgcttaagcctcaataaagcttgccttgagtgcttcaagtagtgtgtgcccgtctgttgtgtgactctggtaactagagatccctcagacccttttagtcagtgtggaaaatctctagcagcatctagaattaattccgtgtattctatagtgtcacctaaatcgtatgtgtatgatacataaggttatgtattaattgtagccgcgttctaacgacaatatgtacaagcctaattgtgtagcatctggcttactgaagcagaccctatcatctctctcgtaaactgccgtcagagtcggtttggttggacgaaccttctgagtttctggtaacgccgtcccgcacccggaaatggtcagcgaaccaatcagcagggtcatcgctagccagatcctctacgccggacgcatcgtggccggcatcaccggcgccacaggtgcggttgctggcgcctatatcgccgacatcaccgatggggaagatcgggctcgccacttcgggctcatgagcgcttgtttcggcgtgggtatggtggcaggccccgtggccgggggactgttgggcgccatctccttgcatgcaccattccttgcggcggcggtgctcaacggcctcaacctactactgggctgcttcctaatgcaggagtcgcataagggagagcgtcgaatggtgcactctcagtacaatctgctctgatgccgcatagttaagccagccccgacacccgccaacacccgctgacgcgccctgacgggcttgtctgctcccggcatccgcttacagacaagctgtgaccgtctccgggagctgcatgtgtcagaggttttcaccgtcatcaccgaaacgcgcgagacgaaagggcctcgtgatacgcctatttttataggttaatgtcatgataataatggtttcttagacgtcaggtggcacttttcggggaaatgtgcgcggaacccctatttgtttatttttctaaatacattcaaatatgtatccgctcatgagacaataaccctgataaatgcttcaataatattgaaaaaggaagagtatgagtattcaacatttccgtgtcgcccttattcccttttttgcggcattttgccttcctgtttttgctcacccagaaacgctggtgaaagtaaaagatgctgaagatcagttgggtgcacgagtgggttacatcgaactggatctcaacagcggtaagatccttgagagttttcgccccgaagaacgttttccaatgatgagcacttttaaagttctgctatgtggcgcggtattatcccgtattgacgccgggcaagagcaactcggtcgccgcatacactattctcagaatgacttggttgagtactcaccagtcacagaaaagcatcttacggatggcatgacagtaagagaattatgcagtgctgccataaccatgagtgataacactgcggccaacttacttctgacaacgatcggaggaccgaaggagctaaccgcttttttgcacaacatgggggatcatgtaactcgccttgatcgttgggaaccggagctgaatgaagccataccaaacgacgagcgtgacaccacgatgcctgtagcaatggcaacaacgttgcgcaaactattaactggcgaactacttactctagcttcccggcaacaattaatagactggatggaggcggataaagttgcaggaccacttctgcgctcggcccttccggctggctggtttattgctgataaatctggagccggtgagcgtgggtctcgcggtatcattgcagcactggggccagatggtaagccctcccgtatcgtagttatctacacgacggggagtcaggcaactatggatgaacgaaatagacagatcgctgagataggtgcctcactgattaagcattggtaactgtcagaccaagtttactcatatatactttagattgatttaaaacttcatttttaatttaaaaggatctaggtgaagatcctttttgataatctcatgaccaaaatcccttaacgtgagttttcgttccactgagcgtcagaccccgtagaaaagatcaaaggatcttcttgagatcctttttttctgcgcgtaatctgctgcttgcaaacaaaaaaaccaccgctaccagcggtggtttgtttgccggatcaagagctaccaactctttttccgaaggtaactggcttcagcagagcgcagataccaaatactgttcttctagtgtagccgtagttaggccaccacttcaagaactctgtagcaccgcctacatacctcgctctgctaatcctgttaccagtggctgctgccagtggcgataagtcgtgtcttaccgggttggactcaagacgatagttaccggataaggcgcagcggtcgggctgaacggggggttcgtgcacacagcccagcttggagcgaacgacctacaccgaactgagatacctacagcgtgagctatgagaaagcgccacgcttcccgaagggagaaaggcggacaggtatccggtaagcggcagggtcggaacaggagagcgcacgagggagcttccagggggaaacgcctggtatctttatagtcctgtcgggtttcgccacctctgacttgagcgtcgatttttgtgatgctcgtcaggggggcggagcctatggaaaaacgccagcaacgcggcctttttacggttcctggccttttgctggccttttgctcacatgttctttcctgcgttatcccctgattctgtggataaccgtattaccgcctttgagtgagctgataccgctcgccgcagccgaacgaccgagcgcagcgagtcagtgagcgaggaagcggaagagcgcccaatacgcaaaccgcctctccccgcgcgttggccgattcattaatgcagctgtggaatgtgtgtcagttagggtgtggaaagtccccaggctccccagcaggcagaagtatgcaaagcatgcatctcaattagtcagcaaccaggtgtggaaagtccccaggctccccagcaggcagaagtatgcaaagcatgcatctcaattagtcagcaaccatagtcccgcccctaactccgcccatcccgcccctaactccgcccagttccgcccattctccgccccatggctgactaattttttttatttatgcagaggccgaggccgcctcggcctctgagctattccagaagtagtgaggaggcttttttggaggcctaggcttttgcaaaaagcttggacacaagacaggcttgcgagatatgtttgagaataccactttatcccgcgtcagggagaggcagtgcgtaaaaagacgcggactcatgtgaaatactggtttttagtgcgccagatctctataatctcgcgcaacctattttcccctcgaacactttttaagccgtagataaacaggctgggacacttcacatgagcgaaaaatacatcgtcacctgggacatgttgcagatccatgcacgtaaactcgcaagccgactgatgccttctgaacaatggaaaggcattattgccgtaagccgtggcggtctgtaccgggtgcgttactggcgcgtgaactgggtattcgtcatgtcgataccgtttgtatttccagctacgatcacgacaaccagcgcgagcttaaagtgctgaaacgcgcagaaggcgatggcgaaggcttcatcgttattgatgacctggtggataccggtggtactgcggttgcgattcgtgaaatgtatccaaaagcgcactttgtcaccatcttcgcaaaaccggctggtcgtccgctggttgatgactatgttgttgatatcccgcaagatacctggattgaacagccgtgggatatgggcgtcgtattcgtcccgccaatctccggtcgctaatcttttcaacgcctggcactgccgggcgttgttctttttaacttcaggcgggttacaatagtttccagtaagtattctggaggctgcatccatgacacaggcaaacctgagcgaaaccctgttcaaaccccgctttaaacatcctgaaacctcgacgctagtccgccgctttaatcacggcgcacaaccgcctgtgcagtcggcccttgatggtaaaaccatccctcactggtatcgcatgattaaccgtctgatgtggatctggcgcggcattgacccacgcgaaatcctcgacgtccaggcacgtattgtgatgagcgatgccgaacgtaccgacgatgatttatacgatacggtgattggctaccgtggcggcaactggatttatgagtgggccccggatctttgtgaaggaaccttacttctgtggtgtgacataattggacaaactacctacagagatttaaagctctaaggtaaatataaaatttttaagtgtataatgtgttaaactactgattctaattgtttgtgtattttagattccaacctatggaactgatgaatgggagcagtggtggaatgcctttaatgaggaaaacctgttttgctcagaagaaatgccatctagtgatgatgaggctactgctgactctcaacattctactcctccaaaaaagaagagaaaggtagaagaccccaaggactttccttcagaattgctaagttttttgagtcatgctgtgtttagtaatagaactcttgcttgctttgctatttacaccacaaaggaaaaagctgcactgctatacaagaaaattatggaaaaatattctgtaacctttataagtaggcataacagttataatcataacatactgttttttcttactccacacaggcatagagtgtctgctattaataactatgctcaaaaattgtgtacctttagctttttaatttgtaaaggggttaataaggaatatttgatgtatagtgccttgactagagatcataatcagccataccacatttgtagaggttttacttgctttaaaaaacctcccacacctccccctgaacctgaaacataaaatgaatgcaattgttgttgttaacttgtttattgcagcttataatggttacaaataaagcaatagcatcacaaatttcacaaataaagcatttttttcactgcattctagttgtggtttgtccaaactcatcaatgtatcttatcatgtctggatcaactggataactcaagctaaccaaaatcatcccaaacttcccaccccataccctattaccactgccaattacctagtggtttcatttactctaaacctgtgattcctctgaattattttcattttaaagaaattgtatttgttaaatatgtactacaaacttagtagtt

SEQ ID NO: 166 - DNA, 11508 bp, synthetic construct
  source 1..11508: mol_type = other DNA
ggaagggctaattcactcccaaagaagacaagatatccttgatctgtggatctaccacacacaaggctacttccctgattagcagaactacacaccagggccaggggtcagatatccactgacctttggatggtgctacaagctagtaccagttgagccagataaggtagaagaggccaataaaggagagaacaccagcttgttacaccctgtgagcctgcatgggatggatgacccggagagagaagtgttagagtggaggtttgacagccgcctagcatttcatcacgtggcccgagagctgcatccggagtacttcaagaactgctgatatcgagcttgctacaagggactttccgctggggactttccagggaggcgtggcctgggcgggactggggagtggcgagccctcagatcctgcatataagcagctgctttttgcctgtactgggtctctctggttagaccagatctgagcctgggagctctctggctaactagggaacccactgcttaagcctcaataaagcttgccttgagtgcttcaagtagtgtgtgcccgtctgttgtgtgactctggtaactagagatccctcagacccttttagtcagtgtggaaaatctctagcagtggcgcccgaacagggacttgaaagcgaaagggaaaccagaggagctctctcgacgcaggactcggcttgctgaagcgcgcacggcaagaggcgaggggcggcgactggtgagtacgccaaaaattttgactagcggaggctagaaggagagagatgggtgcgagagcgtcagtattaagcgggggagaattagatcgcgatgggaaaaaattcggttaaggccagggggaaagaaaaaatataaattaaaacatatagtatgggcaagcagggagctagaacgattcgcagttaatcctggcctgttagaaacatcagaaggctgtagacaaatactgggacagctacaaccatcccttcagacaggatcagaagaacttagatcattatataatacagtagcaaccctctattgtgtgcatcaaaggatagagataaaagacaccaaggaagctttagacaagatagaggaagagcaaaacaaaagtaagaccaccgcacagcaagcggccggccgctgatcttcagacctggacgatatatatgagggacaattggagaagtgaattatataaatataaagtagtaaaaattgaaccattaggagtagcacccaccaaggcaaagagaagagtggtgcagagagaaaaaagagcagtgggaataggagctttgttccttgggttcttgggagcagcaggaagcactatgggcgcagcgtcaatgacgctgacggtacaggccagacaattattgtctggtatagtgcagcagcagaacaatttgctgagggctattgaggcgcaacagcatctgttgcaactcacagtctggggcatcaagcagctccaggcaagaatcctggctgtggaaagatacctaaaggatcaacagctcctggggatttggggttgctctggaaaactcatttgcaccactgctgtgccttggaatgctagttggagtaataaatctctggaacagatttggaatcacacgacctggatggagtgggacagagaaattaacaattacacaagcttaatacactccttaattgaagaatcgcaaaaccagcaagaaaagaatgaacaagaattattggaattagataaatgggcaagtttgtggaattggtttaacataacaaattggctgtggtatataaaattattcataatgatagtaggaggcttggtaggtttaagaatagtttttgctgtactttctatagtgaatagagttaggcagggatattcaccattatcgtttcagacccacctcccaaccccgaggggacccgacaggcccgaaggaatagaagaagaaggtggagagagagacagagacagatccattcgattagtgaacggatctcgacggtatcgccaaatggcagtattcatccacaattttaaaagaaaaggggggattggggggtacagtgcaggggaaagaatagtagacataatagcaacagacatacaaactaaagaattacaaaaacaaattacaaaaattcaaaattttcgggtttattacagggacagcagagatccagtttggatcgataagcttgatatcgaattcgagtcaatgggaaaaacccattggagccaagtacactgactcaatagggactttccattgggttttgcccagtacataaggtcaatagggggtgagtcaacaggaaagtcccattggagccaagtacattgagtcaatagggactttccaatgggttttgcccagtacataaggtcaatgggaggtaagccaatgggtttttcccattactgacatgtatactgagtcattagggactttccaatgggttttgcccagtacataaggtcaataggggtgaatcaacaggaaagtcccattggagccaagtacactgagtcaatagggactttccattgggttttgcccagtacaaaaggtcaatagggggtgagtcaatgggtttttcccattattggcacatacataaggtcaataggggtgactagtggagaagagcatgcttgagggctgagtgcccctcagtgggcagagagcacatggcccacagtccctgagaagttggggggaggggtgggcaattgaactggtgcctagagaaggtggggcttgggtaaactgggaaagtgatgtggtgtactggctccacctttttccccagggtgggggagaaccatatataagtgcagtagtctctgtgaacattcaagcttctgccttctccctcctgtgagtttgggatccgccatggccttaccagtgaccgccttgctcctgccgctggccttgctgctccacgccgccaggccggactacaaagaccatgacggtgattataaagatcatgacatcgattacaaggatgacgatgacaagcaggttaaacttgaggagtctgggggggggttggtccaggccggacggtcattgcggctttcctgtgcagcttcagagcacactttctcatctcatgttatgggttggtttcgccaagctccgggaaaagaacgggaatccgttgcggtaataggttggcgcgatataagcacaagctatgcggattccgtgaagggtcgcttcacaattagcagagataacgcgaaaaaaacgctgtaccttcaaatgaacagcttgaagcccgaggatactgccgtttactattgcgccgcacggcgcatagacgctgctgattttgacagctggggtcagggaacacaagtgacagtctcaagcgggggagggggttctggcggtggggggtctggggggggcggatctggaggtggaggctcaggagggggaggctctgcggtgcaattggtggagtcaggagggggtctcgtccaggcgggcgatagtttgcgcctgacctgtaccgcgtcaggcagagccttctcaacctatttcatggcctggttccgccaggctccagggaaggagcgtgagtttgtagcaggaattgcatggagtggtggtagcacggcgtatgcagactccgtgaagggccgattcaccatctccagagacaacgccaagaacacggtgtatctgcaaatgaacagcctgaaatctgaggacacggccgtttattactgtgccagcagggggattgaggtcgaagagtttggtgcctggggccaggggacccaggtcaccgtctcgtcggggaattctattgaagttatgtatcctcctccttacctagacaatgagaagagcaatggaaccattatccatgtgaaagggaaacacctttgtccaagtcccctatttcccggaccttctaagcccttttgggtgctggtggtggttgggggagtcctggcttgctatagcttgctagtaacagtggcctttattattttctgggttaaacggggcagaaagaaactcctgtatatattcaaacaaccatttatgagaccagtacaaactactcaagaggaagatggctgtagctgccgatttccagaagaagaagaaggaggatgtgaactgagagtgaagttcagcaggagcgcagacgcccccgcgtacaagcagggccagaaccagctctataacgagctcaatctaggacgaagagaggagtacgatgttttggacaagagacgtggccgggaccctgagatggggggaaagccgagaaggaagaaccctcaggaaggcctgtacaatgaactgcagaaagataagatggcggaggcctacagtgagattgggatgaaaggcgagcgccggaggggcaaggggcacgatggcctttaccagggtctcagtacagccaccaaggacacctacgacgcccttcacatgcaggccctgccccctcgcgtcggaagcggagctactaacttcagcctgctgaagcaggctggagatgtggaagagaaccctggacctagatccatggccacaaccatggtgagcaagggcgaggagctgttcaccggggtggtgcccatcctggtcgagctggacggcgacgtaaacggccacaagttcagcgtgtccggcgagggcgagggcgatgccacctacggcaagctgaccctgaagttcatctgcaccaccggcaagctgcccgtgccctggcccaccctcgtgaccaccttgacctacggcgtgcagtgcttcgcccgctaccccgaccacatgaagcagcacgacttcttcaagtccgccatgcccgaaggctacgtccaggagcgcaccatcttcttcaaggacgacggcaactacaagacccgcgccgaggtgaagttcgagggcgacaccctggtgaaccgcatcgagctgaagggcatcgacttcaaggaggacggcaacatcctggggcacaagctggagtacaactacaacagccacaaggtctatatcaccgccgacaagcagaagaacggcatcaaggtgaacttcaagacccgccacaacatcgaggacggcagcgtgcagctcgccgaccactaccagcagaacacccccatcggcgacggccccgtgctgctgcccgacaaccactacctgagcacccagtccgccctgagcaaagaccccaacgagaagcgcgatcacatggtcctgctggagttcgtgaccgccgccgggatcactctcggcatggacgagctgtacaagtaagcggccgcgactctagagtcgacctgcaggcatgcaagcttgatatcaagcttatcgataatcaacctctggattacaaaatttgtgaaagattgactggtattcttaactatgttgctccttttacgctatgtggatacgctgctttaatgcctttgtatcatgctattgcttcccgtatggctttcattttctcctccttgtataaatcctggttgctgtctctttatgaggagttgtggcccgttgtcaggcaacgtggcgtggtgtgcactgtgtttgctgacgcaacccccactggttggggcattgccaccacctgtcagctcctttccgggactttcgctttccccctccctattgccacggcggaactcatcgccgcctgccttgcccgctgctggacaggggctcggctgttgggcactgacaattccgtggtgttgtcggggaaatcatcgtcctttccttggctgctcgcctgtgttgccacctggattctgcgcgggacgtccttctgctacgtcccttcggccctcaatccagcggaccttccttcccgcggcctgctgccggctctgcggcctcttccgcgtcttcgccttcgccctcagacgagtcggatctccctttgggccgcctccccgcatcgataccgtcgacctcgatcgagggaattaattcgagctcggtacctttaagaccaatgacttacaaggcagctgtagatcttagccactttttaaaagaaaaggggggactggaagggctaattcactcccaacgaagacaagatctgctttttgcttgtactgggtctctctggttagaccagatctgagcctgggagctctctggctaactagggaacccactgcttaagcctcaataaagcttgccttgagtgcttcaagtagtgtgtgcccgtctgttgtgtgactctggtaactagagatccctcagacccttttagtcagtgtggaaaatctctagcagcatctagaattaattccgtgtattctatagtgtcacctaaatcgtatgtgtatgatacataaggttatgtattaattgtagccgcgttctaacgacaatatgtacaagcctaattgtgtagcatctggcttactgaagcagaccctatcatctctctcgtaaactgccgtcagagtcggtttggttggacgaaccttctgagtttctggtaacgccgtcccgcacccggaaatggtcagcgaaccaatcagcagggtcatcgctagccagatcctctacgccggacgcatcgtggccggcatcaccggcgccacaggtgcggttgctggcgcctatatcgccgacatcaccgatggggaagatcgggctcgccacttcgggctcatgagcgcttgtttcggcgtgggtatggtggcaggccccgtggccgggggactgttgggcgccatctccttgcatgcaccattccttgcggcggcggtgctcaacggcctcaacctactactgggctgcttcctaatgcaggagtcgcataagggagagcgtcgaatggtgcactctcagtacaatctgctctgatgccgcatagttaagccagccccgacacccgccaacacccgctgacgcgccctgacgggcttgtctgctcccggcatccgcttacagacaagctgtgaccgtctccgggagctgcatgtgtcagaggttttcaccgtcatcaccgaaacgcgcgagacgaaagggcctcgtgatacgcctatttttataggttaatgtcatgataataatggtttcttagacgtcaggtggcacttttcggggaaatgtgcgcggaacccctatttgtttatttttctaaatacattcaaatatgtatccgctcatgagacaataaccctgataaatgcttcaataatattgaaaaaggaagagtatgagtattcaacatttccgtgtcgcccttattcccttttttgcggcattttgccttcctgtttttgctcacccagaaacgctggtgaaagtaaaagatgctgaagatcagttgggtgcacgagtgggttacatcgaactggatctcaacagcggtaagatccttgagagttttcgccccgaagaacgttttccaatgatgagcacttttaaagttctgctatgtggcgcggtattatcccgtattgacgccgggcaagagcaactcggtcgccgcatacactattctcagaatgacttggttgagtactcaccagtcacagaaaagcatcttacggatggcatgacagtaagagaattatgcagtgctgccataaccatgagtgataacactgcggccaacttacttctgacaacgatcggaggaccgaaggagctaaccgcttttttgcacaacatgggggatcatgtaactcgccttgatcgttgggaaccggagctgaatgaagccataccaaacgacgagcgtgacaccacgatgcctgtagcaatggcaacaacgttgcgcaaactattaactggcgaactacttactctagcttcccggcaacaattaatagactggatggaggcggataaagttgcaggaccacttctgcgctcggcccttccggctggctggtttattgctgataaatctggagccggtgagcgtgggtctcgcggtatcattgcagcactggggccagatggtaagccctcccgtatcgtagttatctacacgacggggagtcaggcaactatggatgaacgaaatagacagatcgctgagataggtgcctcactgattaagcattggtaactgtcagaccaagtttactcatatatactttagattgatttaaaacttcatttttaatttaaaaggatctaggtgaagatcctttttgataatctcatgaccaaaatcccttaacgtgagttttcgttccactgagcgtcagaccccgtagaaaagatcaaaggatcttcttgagatcctttttttctgcgcgtaatctgctgcttgcaaacaaaaaaaccaccgctaccagcggtggtttgtttgccggatcaagagctaccaactctttttccgaaggtaactggcttcagcagagcgcagataccaaatactgttcttctagtgtagccgtagttaggccaccacttcaagaactctgtagcaccgcctacatacctcgctctgctaatcctgttaccagtggctgctgccagtggcgataagtcgtgtcttaccgggttggactcaagacgatagttaccggataaggcgcagcggtcgggctgaacggggggttcgtgcacacagcccagcttggagcgaacgacctacaccgaactgagatacctacagcgtgagctatgagaaagcgccacgcttcccgaagggagaaaggcggacaggtatccggtaagcggcagggtcggaacaggagagcgcacgagggagcttccagggggaaacgcctggtatctttatagtcctgtcgggtttcgccacctctgacttgagcgtcgatttttgtgatgctcgtcaggggggcggagcctatggaaaaacgccagcaacgcggcctttttacggttcctggccttttgctggccttttgctcacatgttctttcctgcgttatcccctgattctgtggataaccgtattaccgcctttgagtgagctgataccgctcgccgcagccgaacgaccgagcgcagcgagtcagtgagcgaggaagcggaagagcgcccaatacgcaaaccgcctctccccgcgcgttggccgattcattaatgcagctgtggaatgtgtgtcagttagggtgtggaaagtccccaggctccccagcaggcagaagtatgcaaagcatgcatctcaattagtcagcaaccaggtgtggaaagtccccaggctccccagcaggcagaagtatgcaaagcatgcatctcaattagtcagcaaccatagtcccgcccctaactccgcccatcccgcccctaactccgcccagttccgcccattctccgccccatggctgactaattttttttatttatgcagaggccgaggccgcctcggcctctgagctattccagaagtagtgaggaggcttttttggaggcctaggcttttgcaaaaagcttggacacaagacaggcttgcgagatatgtttgagaataccactttatcccgcgtcagggagaggcagtgcgtaaaaagacgcggactcatgtgaaatactggtttttagtgcgccagatctctataatctcgcgcaacctattttcccctcgaacactttttaagccgtagataaacaggctgggacacttcacatgagcgaaaaatacatcgtcacctgggacatgttgcagatccatgcacgtaaactcgcaagccgactgatgccttctgaacaatggaaaggcattattgccgtaagccgtggcggtctgtaccgggtgcgttactggcgcgtgaactgggtattcgtcatgtcgataccgtttgtatttccagctacgatcacgacaaccagcgcgagcttaaagtgctgaaacgcgcagaaggcgatggcgaaggcttcatcgttattgatgacctggtggataccggtggtactgcggttgcgattcgtgaaatgtatccaaaagcgcactttgtcaccatcttcgcaaaaccggctggtcgtccgctggttgatgactatgttgttgatatcccgcaagatacctggattgaacagccgtgggatatgggcgtcgtattcgtcccgccaatctccggtcgctaatcttttcaacgcctggcactgccgggcgttgttctttttaacttcaggcgggttacaatagtttccagtaagtattctggaggctgcatccatgacacaggcaaacctgagcgaaaccctgttcaaaccccgctttaaacatcctgaaacctcgacgctagtccgccgctttaatcacggcgcacaaccgcctgtgcagtcggcccttgatggtaaaaccatccctcactggtatcgcatgattaaccgtctgatgtggatctggcgcggcattgacccacgcgaaatcctcgacgtccaggcacgtattgtgatgagcgatgccgaacgtaccgacgatgatttatacgatacggtgattggctaccgtggcggcaactggatttatgagtgggccccggatctttgtgaaggaaccttacttctgtggtgtgacataattggacaaactacctacagagatttaaagctctaaggtaaatataaaatttttaagtgtataatgtgttaaactactgattctaattgtttgtgtattttagattccaacctatggaactgatgaatgggagcagtggtggaatgcctttaatgaggaaaacctgttttgctcagaagaaatgccatctagtgatgatgaggctactgctgactctcaacattctactcctccaaaaaagaagagaaaggtagaagaccccaaggactttccttcagaattgctaagttttttgagtcatgctgtgtttagtaatagaactcttgcttgctttgctatttacaccacaaaggaaaaagctgcactgctatacaagaaaattatggaaaaatattctgtaacctttataagtaggcataacagttataatcataacatactgttttttcttactccacacaggcatagagtgtctgctattaataactatgctcaaaaattgtgtacctttagctttttaatttgtaaaggggttaataaggaatatttgatgtatagtgccttgactagagatcataatcagccataccacatttgtagaggttttacttgctttaaaaaacctcccacacctccccctgaacctgaaacataaaatgaatgcaattgttgttgttaacttgtttattgcagcttataatggttacaaataaagcaatagcatcacaaatttcacaaataaagcatttttttcactgcattctagttgtggtttgtccaaactcatcaatgtatcttatcatgtctggatcaactggataactcaagctaaccaaaatcatcccaaacttcccaccccataccctattaccactgccaattacctagtggtttcatttactctaaacctgtgattcctctgaattattttcattttaaagaaattgtatttgttaaatatgtactacaaacttagtagtt

SEQ ID NO: 167 - DNA, 11082 bp, synthetic construct
  source 1..11082: mol_type = other DNA
ggaagggctaattcactcccaaagaagacaagatatccttgatctgtggatctaccacacacaaggctacttccctgattagcagaactacacaccagggccaggggtcagatatccactgacctttggatggtgctacaagctagtaccagttgagccagataaggtagaagaggccaataaaggagagaacaccagcttgttacaccctgtgagcctgcatgggatggatgacccggagagagaagtgttagagtggaggtttgacagccgcctagcatttcatcacgtggcccgagagctgcatccggagtacttcaagaactgctgatatcgagcttgctacaagggactttccgctggggactttccagggaggcgtggcctgggcgggactggggagtggcgagccctcagatcctgcatataagcagctgctttttgcctgtactgggtctctctggttagaccagatctgagcctgggagctctctggctaactagggaacccactgcttaagcctcaataaagcttgccttgagtgcttcaagtagtgtgtgcccgtctgttgtgtgactctggtaactagagatccctcagacccttttagtcagtgtggaaaatctctagcagtggcgcccgaacagggacttgaaagcgaaagggaaaccagaggagctctctcgacgcaggactcggcttgctgaagcgcgcacggcaagaggcgaggggcggcgactggtgagtacgccaaaaattttgactagcggaggctagaaggagagagatgggtgcgagagcgtcagtattaagcgggggagaattagatcgcgatgggaaaaaattcggttaaggccagggggaaagaaaaaatataaattaaaacatatagtatgggcaagcagggagctagaacgattcgcagttaatcctggcctgttagaaacatcagaaggctgtagacaaatactgggacagctacaaccatcccttcagacaggatcagaagaacttagatcattatataatacagtagcaaccctctattgtgtgcatcaaaggatagagataaaagacaccaaggaagctttagacaagatagaggaagagcaaaacaaaagtaagaccaccgcacagcaagcggccggccgctgatcttcagacctggacgatatatatgagggacaattggagaagtgaattatataaatataaagtagtaaaaattgaaccattaggagtagcacccaccaaggcaaagagaagagtggtgcagagagaaaaaagagcagtgggaataggagctttgttccttgggttcttgggagcagcaggaagcactatgggcgcagcgtcaatgacgctgacggtacaggccagacaattattgtctggtatagtgcagcagcagaacaatttgctgagggctattgaggcgcaacagcatctgttgcaactcacagtctggggcatcaagcagctccaggcaagaatcctggctgtggaaagatacctaaaggatcaacagctcctggggatttggggttgctctggaaaactcatttgcaccactgctgtgccttggaatgctagttggagtaataaatctctggaacagatttggaatcacacgacctggatggagtgggacagagaaattaacaattacacaagcttaatacactccttaattgaagaatcgcaaaaccagcaagaaaagaatgaacaagaattattggaattagataaatgggcaagtttgtggaattggtttaacataacaaattggctgtggtatataaaattattcataatgatagtaggaggcttggtaggtttaagaatagtttttgctgtactttctatagtgaatagagttaggcagggatattcaccattatcgtttcagacccacctcccaaccccgaggggacccgacaggcccgaaggaatagaagaagaaggtggagagagagacagagacagatccattcgattagtgaacggatctcgacggtatcgccaaatggcagtattcatccacaattttaaaagaaaaggggggattggggggtacagtgcaggggaaagaatagtagacataatagcaacagacatacaaactaaagaattacaaaaacaaattacaaaaattcaaaattttcgggtttattacagggacagcagagatccagtttggatcgataagcttgatatcgaattcgagtcaatgggaaaaacccattggagccaagtacactgactcaatagggactttccattgggttttgcccagtacataaggtcaatagggggtgagtcaacaggaaagtcccattggagccaagtacattgagtcaatagggactttccaatgggttttgcccagtacataaggtcaatgggaggtaagccaatgggtttttcccattactgacatgtatactgagtcattagggactttccaatgggttttgcccagtacataaggtcaataggggtgaatcaacaggaaagtcccattggagccaagtacactgagtcaatagggactttccattgggttttgcccagtacaaaaggtcaatagggggtgagtcaatgggtttttcccattattggcacatacataaggtcaataggggtgactagtggagaagagcatgcttgagggctgagtgcccctcagtgggcagagagcacatggcccacagtccctgagaagttggggggaggggtgggcaattgaactggtgcctagagaaggtggggcttgggtaaactgggaaagtgatgtggtgtactggctccacctttttccccagggtgggggagaaccatatataagtgcagtagtctctgtgaacattcaagcttctgccttctccctcctgtgagtttgggatccgccatggccttaccagtgaccgccttgctcctgccgctggccttgctgctccacgccgccaggccggactacaaagaccatgacggtgattataaagatcatgacatcgattacaaggatgacgatgacaaggaggtgcagctgttggagtctgggggaggcttggtacagcctggggggtccctgagactctcctgtgcagcctctggattcacctttagcagctatgccatgagctgggtccgccaggctccagggaaggggctggagtgggtctcatctattagtggtagtggtgattacatatactacgcagactccgtgaagggccggttcaccatctccagagacatatccaagaacacgctgtatctgcaaatgaacagcctgagagccgaggacacggccgtatattactgtgcgaaagaaggtacgggtgccaacagcagcttggcagactacagaggccagggcaccctggtcaccgtctcctcagggaattctattgaagttatgtatcctcctccttacctagacaatgagaagagcaatggaaccattatccatgtgaaagggaaacacctttgtccaagtcccctatttcccggaccttctaagcccttttgggtgctggtggtggttgggggagtcctggcttgctatagcttgctagtaacagtggcctttattattttctgggttaaacggggcagaaagaaactcctgtatatattcaaacaaccatttatgagaccagtacaaactactcaagaggaagatggctgtagctgccgatttccagaagaagaagaaggaggatgtgaactgagagtgaagttcagcaggagcgcagacgcccccgcgtacaagcagggccagaaccagctctataacgagctcaatctaggacgaagagaggagtacgatgttttggacaagagacgtggccgggaccctgagatggggggaaagccgagaaggaagaaccctcaggaaggcctgtacaatgaactgcagaaagataagatggcggaggcctacagtgagattgggatgaaaggcgagcgccggaggggcaaggggcacgatggcctttaccagggtctcagtacagccaccaaggacacctacgacgcccttcacatgcaggccctgccccctcgcgtcggaagcggagctactaacttcagcctgctgaagcaggctggagatgtggaagagaaccctggacctagatccatggccacaaccatggtgagcaagggcgaggagctgttcaccggggtggtgcccatcctggtcgagctggacggcgacgtaaacggccacaagttcagcgtgtccggcgagggcgagggcgatgccacctacggcaagctgaccctgaagttcatctgcaccaccggcaagctgcccgtgccctggcccaccctcgtgaccaccttgacctacggcgtgcagtgcttcgcccgctaccccgaccacatgaagcagcacgacttcttcaagtccgccatgcccgaaggctacgtccaggagcgcaccatcttcttcaaggacgacggcaactacaagacccgcgccgaggtgaagttcgagggcgacaccctggtgaaccgcatcgagctgaagggcatcgacttcaaggaggacggcaacatcctggggcacaagctggagtacaactacaacagccacaaggtctatatcaccgccgacaagcagaagaacggcatcaaggtgaacttcaagacccgccacaacatcgaggacggcagcgtgcagctcgccgaccactaccagcagaacacccccatcggcgacggccccgtgctgctgcccgacaaccactacctgagcacccagtccgccctgagcaaagaccccaacgagaagcgcgatcacatggtcctgctggagttcgtgaccgccgccgggatcactctcggcatggacgagctgtacaagtaagcggccgcgactctagagtcgacctgcaggcatgcaagcttgatatcaagcttatcgataatcaacctctggattacaaaatttgtgaaagattgactggtattcttaactatgttgctccttttacgctatgtggatacgctgctttaatgcctttgtatcatgctattgcttcccgtatggctttcattttctcctccttgtataaatcctggttgctgtctctttatgaggagttgtggcccgttgtcaggcaacgtggcgtggtgtgcactgtgtttgctgacgcaacccccactggttggggcattgccaccacctgtcagctcctttccgggactttcgctttccccctccctattgccacggcggaactcatcgccgcctgccttgcccgctgctggacaggggctcggctgttgggcactgacaattccgtggtgttgtcggggaaatcatcgtcctttccttggctgctcgcctgtgttgccacctggattctgcgcgggacgtccttctgctacgtcccttcggccctcaatccagcggaccttccttcccgcggcctgctgccggctctgcggcctcttccgcgtcttcgccttcgccctcagacgagtcggatctccctttgggccgcctccccgcatcgataccgtcgacctcgatcgagggaattaattcgagctcggtacctttaagaccaatgacttacaaggcagctgtagatcttagccactttttaaaagaaaaggggggactggaagggctaattcactcccaacgaagacaagatctgctttttgcttgtactgggtctctctggttagaccagatctgagcctgggagctctctggctaactagggaacccactgcttaagcctcaataaagcttgccttgagtgcttcaagtagtgtgtgcccgtctgttgtgtgactctggtaactagagatccctcagacccttttagtcagtgtggaaaatctctagcagcatctagaattaattccgtgtattctatagtgtcacctaaatcgtatgtgtatgatacataaggttatgtattaattgtagccgcgttctaacgacaatatgtacaagcctaattgtgtagcatctggcttactgaagcagaccctatcatctctctcgtaaactgccgtcagagtcggtttggttggacgaaccttctgagtttctggtaacgccgtcccgcacccggaaatggtcagcgaaccaatcagcagggtcatcgctagccagatcctctacgccggacgcatcgtggccggcatcaccggcgccacaggtgcggttgctggcgcctatatcgccgacatcaccgatggggaagatcgggctcgccacttcgggctcatgagcgcttgtttcggcgtgggtatggtggcaggccccgtggccgggggactgttgggcgccatctccttgcatgcaccattccttgcggcggcggtgctcaacggcctcaacctactactgggctgcttcctaatgcaggagtcgcataagggagagcgtcgaatggtgcactctcagtacaatctgctctgatgccgcatagttaagccagccccgacacccgccaacacccgctgacgcgccctgacgggcttgtctgctcccggcatccgcttacagacaagctgtgaccgtctccgggagctgcatgtgtcagaggttttcaccgtcatcaccgaaacgcgcgagacgaaagggcctcgtgatacgcctatttttataggttaatgtcatgataataatggtttcttagacgtcaggtggcacttttcggggaaatgtgcgcggaacccctatttgtttatttttctaaatacattcaaatatgtatccgctcatgagacaataaccctgataaatgcttcaataatattgaaaaaggaagagtatgagtattcaacatttccgtgtcgcccttattcccttttttgcggcattttgccttcctgtttttgctcacccagaaacgctggtgaaagtaaaagatgctgaagatcagttgggtgcacgagtgggttacatcgaactggatctcaacagcggtaagatccttgagagttttcgccccgaagaacgttttccaatgatgagcacttttaaagttctgctatgtggcgcggtattatcccgtattgacgccgggcaagagcaactcggtcgccgcatacactattctcagaatgacttggttgagtactcaccagtcacagaaaagcatcttacggatggcatgacagtaagagaattatgcagtgctgccataaccatgagtgataacactgcggccaacttacttctgacaacgatcggaggaccgaaggagctaaccgcttttttgcacaacatgggggatcatgtaactcgccttgatcgttgggaaccggagctgaatgaagccataccaaacgacgagcgtgacaccacgatgcctgtagcaatggcaacaacgttgcgcaaactattaactggcgaactacttactctagcttcccggcaacaattaatagactggatggaggcggataaagttgcaggaccacttctgcgctcggcccttccggctggctggtttattgctgataaatctggagccggtgagcgtgggtctcgcggtatcattgcagcactggggccagatggtaagccctcccgtatcgtagttatctacacgacggggagtcaggcaactatggatgaacgaaatagacagatcgctgagataggtgcctcactgattaagcattggtaactgtcagaccaagtttactcatatatactttagattgatttaaaacttcatttttaatttaaaaggatctaggtgaagatcctttttgataatctcatgaccaaaatcccttaacgtgagttttcgttccactgagcgtcagaccccgtagaaaagatcaaaggatcttcttgagatcctttttttctgcgcgtaatctgctgcttgcaaacaaaaaaaccaccgctaccagcggtggtttgtttgccggatcaagagctaccaactctttttccgaaggtaactggcttcagcagagcgcagataccaaatactgttcttctagtgtagccgtagttaggccaccacttcaagaactctgtagcaccgcctacatacctcgctctgctaatcctgttaccagtggctgctgccagtggcgataagtcgtgtcttaccgggttggactcaagacgatagttaccggataaggcgcagcggtcgggctgaacggggggttcgtgcacacagcccagcttggagcgaacgacctacaccgaactgagatacctacagcgtgagctatgagaaagcgccacgcttcccgaagggagaaaggcggacaggtatccggtaagcggcagggtcggaacaggagagcgcacgagggagcttccagggggaaacgcctggtatctttatagtcctgtcgggtttcgccacctctgacttgagcgtcgatttttgtgatgctcgtcaggggggcggagcctatggaaaaacgccagcaacgcggcctttttacggttcctggccttttgctggccttttgctcacatgttctttcctgcgttatcccctgattctgtggataaccgtattaccgcctttgagtgagctgataccgctcgccgcagccgaacgaccgagcgcagcgagtcagtgagcgaggaagcggaagagcgcccaatacgcaaaccgcctctccccgcgcgttggccgattcattaatgcagctgtggaatgtgtgtcagttagggtgtggaaagtccccaggctccccagcaggcagaagtatgcaaagcatgcatctcaattagtcagcaaccaggtgtggaaagtccccaggctccccagcaggcagaagtatgcaaagcatgcatctcaattagtcagcaaccatagtcccgcccctaactccgcccatcccgcccctaactccgcccagttccgcccattctccgccccatggctgactaattttttttatttatgcagaggccgaggccgcctcggcctctgagctattccagaagtagtgaggaggcttttttggaggcctaggcttttgcaaaaagcttggacacaagacaggcttgcgagatatgtttgagaataccactttatcccgcgtcagggagaggcagtgcgtaaaaagacgcggactcatgtgaaatactggtttttagtgcgccagatctctataatctcgcgcaacctattttcccctcgaacactttttaagccgtagataaacaggctgggacacttcacatgagcgaaaaatacatcgtcacctgggacatgttgcagatccatgcacgtaaactcgcaagccgactgatgccttctgaacaatggaaaggcattattgccgtaagccgtggcggtctgtaccgggtgcgttactggcgcgtgaactgggtattcgtcatgtcgataccgtttgtatttccagctacgatcacgacaaccagcgcgagcttaaagtgctgaaacgcgcagaaggcgatggcgaaggcttcatcgttattgatgacctggtggataccggtggtactgcggttgcgattcgtgaaatgtatccaaaagcgcactttgtcaccatcttcgcaaaaccggctggtcgtccgctggttgatgactatgttgttgatatcccgcaagatacctggattgaacagccgtgggatatgggcgtcgtattcgtcccgccaatctccggtcgctaatcttttcaacgcctggcactgccgggcgttgttctttttaacttcaggcgggttacaatagtttccagtaagtattctggaggctgcatccatgacacaggcaaacctgagcgaaaccctgttcaaaccccgctttaaacatcctgaaacctcgacgctagtccgccgctttaatcacggcgcacaaccgcctgtgcagtcggcccttgatggtaaaaccatccctcactggtatcgcatgattaaccgtctgatgtggatctggcgcggcattgacccacgcgaaatcctcgacgtccaggcacgtattgtgatgagcgatgccgaacgtaccgacgatgatttatacgatacggtgattggctaccgtggcggcaactggatttatgagtgggccccggatctttgtgaaggaaccttacttctgtggtgtgacataattggacaaactacctacagagatttaaagctctaaggtaaatataaaatttttaagtgtataatgtgttaaactactgattctaattgtttgtgtattttagattccaacctatggaactgatgaatgggagcagtggtggaatgcctttaatgaggaaaacctgttttgctcagaagaaatgccatctagtgatgatgaggctactgctgactctcaacattctactcctccaaaaaagaagagaaaggtagaagaccccaaggactttccttcagaattgctaagttttttgagtcatgctgtgtttagtaatagaactcttgcttgctttgctatttacaccacaaaggaaaaagctgcactgctatacaagaaaattatggaaaaatattctgtaacctttataagtaggcataacagttataatcataacatactgttttttcttactccacacaggcatagagtgtctgctattaataactatgctcaaaaattgtgtacctttagctttttaatttgtaaaggggttaataaggaatatttgatgtatagtgccttgactagagatcataatcagccataccacatttgtagaggttttacttgctttaaaaaacctcccacacctccccctgaacctgaaacataaaatgaatgcaattgttgttgttaacttgtttattgcagcttataatggttacaaataaagcaatagcatcacaaatttcacaaataaagcatttttttcactgcattctagttgtggtttgtccaaactcatcaatgtatcttatcatgtctggatcaactggataactcaagctaaccaaaatcatcccaaacttcccaccccataccctattaccactgccaattacctagtggtttcatttactctaaacctgtgattcctctgaattattttcattttaaagaaattgtatttgttaaatatgtactacaaacttagtagtt

SEQ ID NO: 168 - DNA, 11475 bp, synthetic construct
  source 1..11475: mol_type = other DNA
ggaagggctaattcactcccaaagaagacaagatatccttgatctgtggatctaccacacacaaggctacttccctgattagcagaactacacaccagggccaggggtcagatatccactgacctttggatggtgctacaagctagtaccagttgagccagataaggtagaagaggccaataaaggagagaacaccagcttgttacaccctgtgagcctgcatgggatggatgacccggagagagaagtgttagagtggaggtttgacagccgcctagcatttcatcacgtggcccgagagctgcatccggagtacttcaagaactgctgatatcgagcttgctacaagggactttccgctggggactttccagggaggcgtggcctgggcgggactggggagtggcgagccctcagatcctgcatataagcagctgctttttgcctgtactgggtctctctggttagaccagatctgagcctgggagctctctggctaactagggaacccactgcttaagcctcaataaagcttgccttgagtgcttcaagtagtgtgtgcccgtctgttgtgtgactctggtaactagagatccctcagacccttttagtcagtgtggaaaatctctagcagtggcgcccgaacagggacttgaaagcgaaagggaaaccagaggagctctctcgacgcaggactcggcttgctgaagcgcgcacggcaagaggcgaggggcggcgactggtgagtacgccaaaaattttgactagcggaggctagaaggagagagatgggtgcgagagcgtcagtattaagcgggggagaattagatcgcgatgggaaaaaattcggttaaggccagggggaaagaaaaaatataaattaaaacatatagtatgggcaagcagggagctagaacgattcgcagttaatcctggcctgttagaaacatcagaaggctgtagacaaatactgggacagctacaaccatcccttcagacaggatcagaagaacttagatcattatataatacagtagcaaccctctattgtgtgcatcaaaggatagagataaaagacaccaaggaagctttagacaagatagaggaagagcaaaacaaaagtaagaccaccgcacagcaagcggccggccgctgatcttcagacctggacgatatatatgagggacaattggagaagtgaattatataaatataaagtagtaaaaattgaaccattaggagtagcacccaccaaggcaaagagaagagtggtgcagagagaaaaaagagcagtgggaataggagctttgttccttgggttcttgggagcagcaggaagcactatgggcgcagcgtcaatgacgctgacggtacaggccagacaattattgtctggtatagtgcagcagcagaacaatttgctgagggctattgaggcgcaacagcatctgttgcaactcacagtctggggcatcaagcagctccaggcaagaatcctggctgtggaaagatacctaaaggatcaacagctcctggggatttggggttgctctggaaaactcatttgcaccactgctgtgccttggaatgctagttggagtaataaatctctggaacagatttggaatcacacgacctggatggagtgggacagagaaattaacaattacacaagcttaatacactccttaattgaagaatcgcaaaaccagcaagaaaagaatgaacaagaattattggaattagataaatgggcaagtttgtggaattggtttaacataacaaattggctgtggtatataaaattattcataatgatagtaggaggcttggtaggtttaagaatagtttttgctgtactttctatagtgaatagagttaggcagggatattcaccattatcgtttcagacccacctcccaaccccgaggggacccgacaggcccgaaggaatagaagaagaaggtggagagagagacagagacagatccattcgattagtgaacggatctcgacggtatcgccaaatggcagtattcatccacaattttaaaagaaaaggggggattggggggtacagtgcaggggaaagaatagtagacataatagcaacagacatacaaactaaagaattacaaaaacaaattacaaaaattcaaaattttcgggtttattacagggacagcagagatccagtttggatcgataagcttgatatcgaattcgagtcaatgggaaaaacccattggagccaagtacactgactcaatagggactttccattgggttttgcccagtacataaggtcaatagggggtgagtcaacaggaaagtcccattggagccaagtacattgagtcaatagggactttccaatgggttttgcccagtacataaggtcaatgggaggtaagccaatgggtttttcccattactgacatgtatactgagtcattagggactttccaatgggttttgcccagtacataaggtcaataggggtgaatcaacaggaaagtcccattggagccaagtacactgagtcaatagggactttccattgggttttgcccagtacaaaaggtcaatagggggtgagtcaatgggtttttcccattattggcacatacataaggtcaataggggtgactagtggagaagagcatgcttgagggctgagtgcccctcagtgggcagagagcacatggcccacagtccctgagaagttggggggaggggtgggcaattgaactggtgcctagagaaggtggggcttgggtaaactgggaaagtgatgtggtgtactggctccacctttttccccagggtgggggagaaccatatataagtgcagtagtctctgtgaacattcaagcttctgccttctccctcctgtgagtttgggatccgccatggccttaccagtgaccgccttgctcctgccgctggccttgctgctccacgccgccaggccggactacaaagaccatgacggtgattataaagatcatgacatcgattacaaggatgacgatgacaagcaggtcaaactggaagaaagtgggggaggcctggtgcaggcaggacggagcctgcgcctgagctgcgcagcatccgagcacaccttcagctcccacgtgatgggctggtttcggcaggccccaggcaaggagagagagtccgtggccgtgatcggctggagggacatctccacatcttacgccgattctgtgaagggccggttcaccatcagcagagacaacgccaagaagacactgtatctgcagatgaatagcctgaagcccgaggacaccgccgtgtactattgcgcagcaaggagaatcgacgcagcagactttgattcctggggccagggcacccaggtgacagtgtctagcggtggcggaggatctggcggcggaggaagcggaggcggcggatctgaggtgcagctggtggagtctggaggcggcctggtgcaggccggaggctctctgaggctgagctgtgcagcatccggaagaaccttcacaatgggctggtttaggcaggcaccaggaaaggagagggagttcgtggcagcaatcagcctgtcccctaccctggcctactatgccgagtccgtgaagggcaggtttaccatctctcgcgataacgccaagaatacagtggtgctgcagatgaacagcctgaaacctgaggacacagccctgtactattgtgccgccgatcggaagagcgtgatgagcattagacccgattattggggacagggcacacaggtgacagtgagtagcgggaattctattgaagttatgtatcctcctccttacctagacaatgagaagagcaatggaaccattatccatgtgaaagggaaacacctttgtccaagtcccctatttcccggaccttctaagcccttttgggtgctggtggtggttgggggagtcctggcttgctatagcttgctagtaacagtggcctttattattttctgggttaaacggggcagaaagaaactcctgtatatattcaaacaaccatttatgagaccagtacaaactactcaagaggaagatggctgtagctgccgatttccagaagaagaagaaggaggatgtgaactgagagtgaagttcagcaggagcgcagacgcccccgcgtacaagcagggccagaaccagctctataacgagctcaatctaggacgaagagaggagtacgatgttttggacaagagacgtggccgggaccctgagatggggggaaagccgagaaggaagaaccctcaggaaggcctgtacaatgaactgcagaaagataagatggcggaggcctacagtgagattgggatgaaaggcgagcgccggaggggcaaggggcacgatggcctttaccagggtctcagtacagccaccaaggacacctacgacgcccttcacatgcaggccctgccccctcgcgtcggaagcggagctactaacttcagcctgctgaagcaggctggagatgtggaagagaaccctggacctagatccatggccacaaccatggtgagcaagggcgaggagctgttcaccggggtggtgcccatcctggtcgagctggacggcgacgtaaacggccacaagttcagcgtgtccggcgagggcgagggcgatgccacctacggcaagctgaccctgaagttcatctgcaccaccggcaagctgcccgtgccctggcccaccctcgtgaccaccttgacctacggcgtgcagtgcttcgcccgctaccccgaccacatgaagcagcacgacttcttcaagtccgccatgcccgaaggctacgtccaggagcgcaccatcttcttcaaggacgacggcaactacaagacccgcgccgaggtgaagttcgagggcgacaccctggtgaaccgcatcgagctgaagggcatcgacttcaaggaggacggcaacatcctggggcacaagctggagtacaactacaacagccacaaggtctatatcaccgccgacaagcagaagaacggcatcaaggtgaacttcaagacccgccacaacatcgaggacggcagcgtgcagctcgccgaccactaccagcagaacacccccatcggcgacggccccgtgctgctgcccgacaaccactacctgagcacccagtccgccctgagcaaagaccccaacgagaagcgcgatcacatggtcctgctggagttcgtgaccgccgccgggatcactctcggcatggacgagctgtacaagtaagcggccgcgactctagagtcgacctgcaggcatgcaagcttgatatcaagcttatcgataatcaacctctggattacaaaatttgtgaaagattgactggtattcttaactatgttgctccttttacgctatgtggatacgctgctttaatgcctttgtatcatgctattgcttcccgtatggctttcattttctcctccttgtataaatcctggttgctgtctctttatgaggagttgtggcccgttgtcaggcaacgtggcgtggtgtgcactgtgtttgctgacgcaacccccactggttggggcattgccaccacctgtcagctcctttccgggactttcgctttccccctccctattgccacggcggaactcatcgccgcctgccttgcccgctgctggacaggggctcggctgttgggcactgacaattccgtggtgttgtcggggaaatcatcgtcctttccttggctgctcgcctgtgttgccacctggattctgcgcgggacgtccttctgctacgtcccttcggccctcaatccagcggaccttccttcccgcggcctgctgccggctctgcggcctcttccgcgtcttcgccttcgccctcagacgagtcggatctccctttgggccgcctccccgcatcgataccgtcgacctcgatcgagggaattaattcgagctcggtacctttaagaccaatgacttacaaggcagctgtagatcttagccactttttaaaagaaaaggggggactggaagggctaattcactcccaacgaagacaagatctgctttttgcttgtactgggtctctctggttagaccagatctgagcctgggagctctctggctaactagggaacccactgcttaagcctcaataaagcttgccttgagtgcttcaagtagtgtgtgcccgtctgttgtgtgactctggtaactagagatccctcagacccttttagtcagtgtggaaaatctctagcagcatctagaattaattccgtgtattctatagtgtcacctaaatcgtatgtgtatgatacataaggttatgtattaattgtagccgcgttctaacgacaatatgtacaagcctaattgtgtagcatctggcttactgaagcagaccctatcatctctctcgtaaactgccgtcagagtcggtttggttggacgaaccttctgagtttctggtaacgccgtcccgcacccggaaatggtcagcgaaccaatcagcagggtcatcgctagccagatcctctacgccggacgcatcgtggccggcatcaccggcgccacaggtgcggttgctggcgcctatatcgccgacatcaccgatggggaagatcgggctcgccacttcgggctcatgagcgcttgtttcggcgtgggtatggtggcaggccccgtggccgggggactgttgggcgccatctccttgcatgcaccattccttgcggcggcggtgctcaacggcctcaacctactactgggctgcttcctaatgcaggagtcgcataagggagagcgtcgaatggtgcactctcagtacaatctgctctgatgccgcatagttaagccagccccgacacccgccaacacccgctgacgcgccctgacgggcttgtctgctcccggcatccgcttacagacaagctgtgaccgtctccgggagctgcatgtgtcagaggttttcaccgtcatcaccgaaacgcgcgagacgaaagggcctcgtgatacgcctatttttataggttaatgtcatgataataatggtttcttagacgtcaggtggcacttttcggggaaatgtgcgcggaacccctatttgtttatttttctaaatacattcaaatatgtatccgctcatgagacaataaccctgataaatgcttcaataatattgaaaaaggaagagtatgagtattcaacatttccgtgtcgcccttattcccttttttgcggcattttgccttcctgtttttgctcacccagaaacgctggtgaaagtaaaagatgctgaagatcagttgggtgcacgagtgggttacatcgaactggatctcaacagcggtaagatccttgagagttttcgccccgaagaacgttttccaatgatgagcacttttaaagttctgctatgtggcgcggtattatcccgtattgacgccgggcaagagcaactcggtcgccgcatacactattctcagaatgacttggttgagtactcaccagtcacagaaaagcatcttacggatggcatgacagtaagagaattatgcagtgctgccataaccatgagtgataacactgcggccaacttacttctgacaacgatcggaggaccgaaggagctaaccgcttttttgcacaacatgggggatcatgtaactcgccttgatcgttgggaaccggagctgaatgaagccataccaaacgacgagcgtgacaccacgatgcctgtagcaatggcaacaacgttgcgcaaactattaactggcgaactacttactctagcttcccggcaacaattaatagactggatggaggcggataaagttgcaggaccacttctgcgctcggcccttccggctggctggtttattgctgataaatctggagccggtgagcgtgggtctcgcggtatcattgcagcactggggccagatggtaagccctcccgtatcgtagttatctacacgacggggagtcaggcaactatggatgaacgaaatagacagatcgctgagataggtgcctcactgattaagcattggtaactgtcagaccaagtttactcatatatactttagattgatttaaaacttcatttttaatttaaaaggatctaggtgaagatcctttttgataatctcatgaccaaaatcccttaacgtgagttttcgttccactgagcgtcagaccccgtagaaaagatcaaaggatcttcttgagatcctttttttctgcgcgtaatctgctgcttgcaaacaaaaaaaccaccgctaccagcggtggtttgtttgccggatcaagagctaccaactctttttccgaaggtaactggcttcagcagagcgcagataccaaatactgttcttctagtgtagccgtagttaggccaccacttcaagaactctgtagcaccgcctacatacctcgctctgctaatcctgttaccagtggctgctgccagtggcgataagtcgtgtcttaccgggttggactcaagacgatagttaccggataaggcgcagcggtcgggctgaacggggggttcgtgcacacagcccagcttggagcgaacgacctacaccgaactgagatacctacagcgtgagctatgagaaagcgccacgcttcccgaagggagaaaggcggacaggtatccggtaagcggcagggtcggaacaggagagcgcacgagggagcttccagggggaaacgcctggtatctttatagtcctgtcgggtttcgccacctctgacttgagcgtcgatttttgtgatgctcgtcaggggggcggagcctatggaaaaacgccagcaacgcggcctttttacggttcctggccttttgctggccttttgctcacatgttctttcctgcgttatcccctgattctgtggataaccgtattaccgcctttgagtgagctgataccgctcgccgcagccgaacgaccgagcgcagcgagtcagtgagcgaggaagcggaagagcgcccaatacgcaaaccgcctctccccgcgcgttggccgattcattaatgcagctgtggaatgtgtgtcagttagggtgtggaaagtccccaggctccccagcaggcagaagtatgcaaagcatgcatctcaattagtcagcaaccaggtgtggaaagtccccaggctccccagcaggcagaagtatgcaaagcatgcatctcaattagtcagcaaccatagtcccgcccctaactccgcccatcccgcccctaactccgcccagttccgcccattctccgccccatggctgactaattttttttatttatgcagaggccgaggccgcctcggcctctgagctattccagaagtagtgaggaggcttttttggaggcctaggcttttgcaaaaagcttggacacaagacaggcttgcgagatatgtttgagaataccactttatcccgcgtcagggagaggcagtgcgtaaaaagacgcggactcatgtgaaatactggtttttagtgcgccagatctctataatctcgcgcaacctattttcccctcgaacactttttaagccgtagataaacaggctgggacacttcacatgagcgaaaaatacatcgtcacctgggacatgttgcagatccatgcacgtaaactcgcaagccgactgatgccttctgaacaatggaaaggcattattgccgtaagccgtggcggtctgtaccgggtgcgttactggcgcgtgaactgggtattcgtcatgtcgataccgtttgtatttccagctacgatcacgacaaccagcgcgagcttaaagtgctgaaacgcgcagaaggcgatggcgaaggcttcatcgttattgatgacctggtggataccggtggtactgcggttgcgattcgtgaaatgtatccaaaagcgcactttgtcaccatcttcgcaaaaccggctggtcgtccgctggttgatgactatgttgttgatatcccgcaagatacctggattgaacagccgtgggatatgggcgtcgtattcgtcccgccaatctccggtcgctaatcttttcaacgcctggcactgccgggcgttgttctttttaacttcaggcgggttacaatagtttccagtaagtattctggaggctgcatccatgacacaggcaaacctgagcgaaaccctgttcaaaccccgctttaaacatcctgaaacctcgacgctagtccgccgctttaatcacggcgcacaaccgcctgtgcagtcggcccttgatggtaaaaccatccctcactggtatcgcatgattaaccgtctgatgtggatctggcgcggcattgacccacgcgaaatcctcgacgtccaggcacgtattgtgatgagcgatgccgaacgtaccgacgatgatttatacgatacggtgattggctaccgtggcggcaactggatttatgagtgggccccggatctttgtgaaggaaccttacttctgtggtgtgacataattggacaaactacctacagagatttaaagctctaaggtaaatataaaatttttaagtgtataatgtgttaaactactgattctaattgtttgtgtattttagattccaacctatggaactgatgaatgggagcagtggtggaatgcctttaatgaggaaaacctgttttgctcagaagaaatgccatctagtgatgatgaggctactgctgactctcaacattctactcctccaaaaaagaagagaaaggtagaagaccccaaggactttccttcagaattgctaagttttttgagtcatgctgtgtttagtaatagaactcttgcttgctttgctatttacaccacaaaggaaaaagctgcactgctatacaagaaaattatggaaaaatattctgtaacctttataagtaggcataacagttataatcataacatactgttttttcttactccacacaggcatagagtgtctgctattaataactatgctcaaaaattgtgtacctttagctttttaatttgtaaaggggttaataaggaatatttgatgtatagtgccttgactagagatcataatcagccataccacatttgtagaggttttacttgctttaaaaaacctcccacacctccccctgaacctgaaacataaaatgaatgcaattgttgttgttaacttgtttattgcagcttataatggttacaaataaagcaatagcatcacaaatttcacaaataaagcatttttttcactgcattctagttgtggtttgtccaaactcatcaatgtatcttatcatgtctggatcaactggataactcaagctaaccaaaatcatcccaaacttcccaccccataccctattaccactgccaattacctagtggtttcatttactctaaacctgtgattcctctgaattattttcattttaaagaaattgtatttgttaaatatgtactacaaacttagtagtt

SEQ ID NO: 169 - DNA, 11451 bp, synthetic construct
  source 1..11451: mol_type = other DNA
ggaagggctaattcactcccaaagaagacaagatatccttgatctgtggatctaccacacacaaggctacttccctgattagcagaactacacaccagggccaggggtcagatatccactgacctttggatggtgctacaagctagtaccagttgagccagataaggtagaagaggccaataaaggagagaacaccagcttgttacaccctgtgagcctgcatgggatggatgacccggagagagaagtgttagagtggaggtttgacagccgcctagcatttcatcacgtggcccgagagctgcatccggagtacttcaagaactgctgatatcgagcttgctacaagggactttccgctggggactttccagggaggcgtggcctgggcgggactggggagtggcgagccctcagatcctgcatataagcagctgctttttgcctgtactgggtctctctggttagaccagatctgagcctgggagctctctggctaactagggaacccactgcttaagcctcaataaagcttgccttgagtgcttcaagtagtgtgtgcccgtctgttgtgtgactctggtaactagagatccctcagacccttttagtcagtgtggaaaatctctagcagtggcgcccgaacagggacttgaaagcgaaagggaaaccagaggagctctctcgacgcaggactcggcttgctgaagcgcgcacggcaagaggcgaggggcggcgactggtgagtacgccaaaaattttgactagcggaggctagaaggagagagatgggtgcgagagcgtcagtattaagcgggggagaattagatcgcgatgggaaaaaattcggttaaggccagggggaaagaaaaaatataaattaaaacatatagtatgggcaagcagggagctagaacgattcgcagttaatcctggcctgttagaaacatcagaaggctgtagacaaatactgggacagctacaaccatcccttcagacaggatcagaagaacttagatcattatataatacagtagcaaccctctattgtgtgcatcaaaggatagagataaaagacaccaaggaagctttagacaagatagaggaagagcaaaacaaaagtaagaccaccgcacagcaagcggccggccgctgatcttcagacctggacgatatatatgagggacaattggagaagtgaattatataaatataaagtagtaaaaattgaaccattaggagtagcacccaccaaggcaaagagaagagtggtgcagagagaaaaaagagcagtgggaataggagctttgttccttgggttcttgggagcagcaggaagcactatgggcgcagcgtcaatgacgctgacggtacaggccagacaattattgtctggtatagtgcagcagcagaacaatttgctgagggctattgaggcgcaacagcatctgttgcaactcacagtctggggcatcaagcagctccaggcaagaatcctggctgtggaaagatacctaaaggatcaacagctcctggggatttggggttgctctggaaaactcatttgcaccactgctgtgccttggaatgctagttggagtaataaatctctggaacagatttggaatcacacgacctggatggagtgggacagagaaattaacaattacacaagcttaatacactccttaattgaagaatcgcaaaaccagcaagaaaagaatgaacaagaattattggaattagataaatgggcaagtttgtggaattggtttaacataacaaattggctgtggtatataaaattattcataatgatagtaggaggcttggtaggtttaagaatagtttttgctgtactttctatagtgaatagagttaggcagggatattcaccattatcgtttcagacccacctcccaaccccgaggggacccgacaggcccgaaggaatagaagaagaaggtggagagagagacagagacagatccattcgattagtgaacggatctcgacggtatcgccaaatggcagtattcatccacaattttaaaagaaaaggggggattggggggtacagtgcaggggaaagaatagtagacataatagcaacagacatacaaactaaagaattacaaaaacaaattacaaaaattcaaaattttcgggtttattacagggacagcagagatccagtttggatcgataagcttgatatcgaattcgagtcaatgggaaaaacccattggagccaagtacactgactcaatagggactttccattgggttttgcccagtacataaggtcaatagggggtgagtcaacaggaaagtcccattggagccaagtacattgagtcaatagggactttccaatgggttttgcccagtacataaggtcaatgggaggtaagccaatgggtttttcccattactgacatgtatactgagtcattagggactttccaatgggttttgcccagtacataaggtcaataggggtgaatcaacaggaaagtcccattggagccaagtacactgagtcaatagggactttccattgggttttgcccagtacaaaaggtcaatagggggtgagtcaatgggtttttcccattattggcacatacataaggtcaataggggtgactagtggagaagagcatgcttgagggctgagtgcccctcagtgggcagagagcacatggcccacagtccctgagaagttggggggaggggtgggcaattgaactggtgcctagagaaggtggggcttgggtaaactgggaaagtgatgtggtgtactggctccacctttttccccagggtgggggagaaccatatataagtgcagtagtctctgtgaacattcaagcttctgccttctccctcctgtgagtttgggatccgccatggccttaccagtgaccgccttgctcctgccgctggccttgctgctccacgccgccaggccggactacaaagaccatgacggtgattataaagatcatgacatcgattacaaggatgacgatgacaagcagtctgccctgacacagcctgccagcgttagtgctagtcccggacagtctatcgccatcagctgtaccggcaccagctctgacgttggctggtatcagcagcaccctggcaaggcccctaagctgatgatctacgaggacagcaagaggcccagcggcgtgtccaatagattcagcggcagcaagagcggcaacaccgccagcctgacaattagcggactgcaggccgaggacgaggccgattactactgcagcagcaacacccggtctagcacactggtttttggcggaggcaccaagctgacagtgctgggatctagaggtggcggaggatctggcggcggaggaagcggaggcggcggatctcttgaaatggctgaagtgcagctggtgcagtctggcgccgagatgaagaaacctggcgcctctctgaagctgagctgcaaggccagcggctacaccttcatcgactactacgtgtactggatgcggcaggcccctggacagggactcgaatctatgggctggatcaaccccaatagcggcggcaccaattacgcccagaaattccagggcagagtgaccatgaccagagacaccagcatcagcaccgcctacatggaactgagccggctgagatccgacgacaccgccatgtactactgcgccagatctcagcgcgacggctacatggattattggggccagggaaccctggtcaccgtgtccagcgggaattctattgaagttatgtatcctcctccttacctagacaatgagaagagcaatggaaccattatccatgtgaaagggaaacacctttgtccaagtcccctatttcccggaccttctaagcccttttgggtgctggtggtggttgggggagtcctggcttgctatagcttgctagtaacagtggcctttattattttctgggttaaacggggcagaaagaaactcctgtatatattcaaacaaccatttatgagaccagtacaaactactcaagaggaagatggctgtagctgccgatttccagaagaagaagaaggaggatgtgaactgagagtgaagttcagcaggagcgcagacgcccccgcgtacaagcagggccagaaccagctctataacgagctcaatctaggacgaagagaggagtacgatgttttggacaagagacgtggccgggaccctgagatggggggaaagccgagaaggaagaaccctcaggaaggcctgtacaatgaactgcagaaagataagatggcggaggcctacagtgagattgggatgaaaggcgagcgccggaggggcaaggggcacgatggcctttaccagggtctcagtacagccaccaaggacacctacgacgcccttcacatgcaggccctgccccctcgcgtcggaagcggagctactaacttcagcctgctgaagcaggctggagatgtggaagagaaccctggacctagatccatggccacaaccatggtgagcaagggcgaggagctgttcaccggggtggtgcccatcctggtcgagctggacggcgacgtaaacggccacaagttcagcgtgtccggcgagggcgagggcgatgccacctacggcaagctgaccctgaagttcatctgcaccaccggcaagctgcccgtgccctggcccaccctcgtgaccaccttgacctacggcgtgcagtgcttcgcccgctaccccgaccacatgaagcagcacgacttcttcaagtccgccatgcccgaaggctacgtccaggagcgcaccatcttcttcaaggacgacggcaactacaagacccgcgccgaggtgaagttcgagggcgacaccctggtgaaccgcatcgagctgaagggcatcgacttcaaggaggacggcaacatcctggggcacaagctggagtacaactacaacagccacaaggtctatatcaccgccgacaagcagaagaacggcatcaaggtgaacttcaagacccgccacaacatcgaggacggcagcgtgcagctcgccgaccactaccagcagaacacccccatcggcgacggccccgtgctgctgcccgacaaccactacctgagcacccagtccgccctgagcaaagaccccaacgagaagcgcgatcacatggtcctgctggagttcgtgaccgccgccgggatcactctcggcatggacgagctgtacaagtaagcggccgcgactctagagtcgacctgcaggcatgcaagcttgatatcaagcttatcgataatcaacctctggattacaaaatttgtgaaagattgactggtattcttaactatgttgctccttttacgctatgtggatacgctgctttaatgcctttgtatcatgctattgcttcccgtatggctttcattttctcctccttgtataaatcctggttgctgtctctttatgaggagttgtggcccgttgtcaggcaacgtggcgtggtgtgcactgtgtttgctgacgcaacccccactggttggggcattgccaccacctgtcagctcctttccgggactttcgctttccccctccctattgccacggcggaactcatcgccgcctgccttgcccgctgctggacaggggctcggctgttgggcactgacaattccgtggtgttgtcggggaaatcatcgtcctttccttggctgctcgcctgtgttgccacctggattctgcgcgggacgtccttctgctacgtcccttcggccctcaatccagcggaccttccttcccgcggcctgctgccggctctgcggcctcttccgcgtcttcgccttcgccctcagacgagtcggatctccctttgggccgcctccccgcatcgataccgtcgacctcgatcgagggaattaattcgagctcggtacctttaagaccaatgacttacaaggcagctgtagatcttagccactttttaaaagaaaaggggggactggaagggctaattcactcccaacgaagacaagatctgctttttgcttgtactgggtctctctggttagaccagatctgagcctgggagctctctggctaactagggaacccactgcttaagcctcaataaagcttgccttgagtgcttcaagtagtgtgtgcccgtctgttgtgtgactctggtaactagagatccctcagacccttttagtcagtgtggaaaatctctagcagcatctagaattaattccgtgtattctatagtgtcacctaaatcgtatgtgtatgatacataaggttatgtattaattgtagccgcgttctaacgacaatatgtacaagcctaattgtgtagcatctggcttactgaagcagaccctatcatctctctcgtaaactgccgtcagagtcggtttggttggacgaaccttctgagtttctggtaacgccgtcccgcacccggaaatggtcagcgaaccaatcagcagggtcatcgctagccagatcctctacgccggacgcatcgtggccggcatcaccggcgccacaggtgcggttgctggcgcctatatcgccgacatcaccgatggggaagatcgggctcgccacttcgggctcatgagcgcttgtttcggcgtgggtatggtggcaggccccgtggccgggggactgttgggcgccatctccttgcatgcaccattccttgcggcggcggtgctcaacggcctcaacctactactgggctgcttcctaatgcaggagtcgcataagggagagcgtcgaatggtgcactctcagtacaatctgctctgatgccgcatagttaagccagccccgacacccgccaacacccgctgacgcgccctgacgggcttgtctgctcccggcatccgcttacagacaagctgtgaccgtctccgggagctgcatgtgtcagaggttttcaccgtcatcaccgaaacgcgcgagacgaaagggcctcgtgatacgcctatttttataggttaatgtcatgataataatggtttcttagacgtcaggtggcacttttcggggaaatgtgcgcggaacccctatttgtttatttttctaaatacattcaaatatgtatccgctcatgagacaataaccctgataaatgcttcaataatattgaaaaaggaagagtatgagtattcaacatttccgtgtcgcccttattcccttttttgcggcattttgccttcctgtttttgctcacccagaaacgctggtgaaagtaaaagatgctgaagatcagttgggtgcacgagtgggttacatcgaactggatctcaacagcggtaagatccttgagagttttcgccccgaagaacgttttccaatgatgagcacttttaaagttctgctatgtggcgcggtattatcccgtattgacgccgggcaagagcaactcggtcgccgcatacactattctcagaatgacttggttgagtactcaccagtcacagaaaagcatcttacggatggcatgacagtaagagaattatgcagtgctgccataaccatgagtgataacactgcggccaacttacttctgacaacgatcggaggaccgaaggagctaaccgcttttttgcacaacatgggggatcatgtaactcgccttgatcgttgggaaccggagctgaatgaagccataccaaacgacgagcgtgacaccacgatgcctgtagcaatggcaacaacgttgcgcaaactattaactggcgaactacttactctagcttcccggcaacaattaatagactggatggaggcggataaagttgcaggaccacttctgcgctcggcccttccggctggctggtttattgctgataaatctggagccggtgagcgtgggtctcgcggtatcattgcagcactggggccagatggtaagccctcccgtatcgtagttatctacacgacggggagtcaggcaactatggatgaacgaaatagacagatcgctgagataggtgcctcactgattaagcattggtaactgtcagaccaagtttactcatatatactttagattgatttaaaacttcatttttaatttaaaaggatctaggtgaagatcctttttgataatctcatgaccaaaatcccttaacgtgagttttcgttccactgagcgtcagaccccgtagaaaagatcaaaggatcttcttgagatcctttttttctgcgcgtaatctgctgcttgcaaacaaaaaaaccaccgctaccagcggtggtttgtttgccggatcaagagctaccaactctttttccgaaggtaactggcttcagcagagcgcagataccaaatactgttcttctagtgtagccgtagttaggccaccacttcaagaactctgtagcaccgcctacatacctcgctctgctaatcctgttaccagtggctgctgccagtggcgataagtcgtgtcttaccgggttggactcaagacgatagttaccggataaggcgcagcggtcgggctgaacggggggttcgtgcacacagcccagcttggagcgaacgacctacaccgaactgagatacctacagcgtgagctatgagaaagcgccacgcttcccgaagggagaaaggcggacaggtatccggtaagcggcagggtcggaacaggagagcgcacgagggagcttccagggggaaacgcctggtatctttatagtcctgtcgggtttcgccacctctgacttgagcgtcgatttttgtgatgctcgtcaggggggcggagcctatggaaaaacgccagcaacgcggcctttttacggttcctggccttttgctggccttttgctcacatgttctttcctgcgttatcccctgattctgtggataaccgtattaccgcctttgagtgagctgataccgctcgccgcagccgaacgaccgagcgcagcgagtcagtgagcgaggaagcggaagagcgcccaatacgcaaaccgcctctccccgcgcgttggccgattcattaatgcagctgtggaatgtgtgtcagttagggtgtggaaagtccccaggctccccagcaggcagaagtatgcaaagcatgcatctcaattagtcagcaaccaggtgtggaaagtccccaggctccccagcaggcagaagtatgcaaagcatgcatctcaattagtcagcaaccatagtcccgcccctaactccgcccatcccgcccctaactccgcccagttccgcccattctccgccccatggctgactaattttttttatttatgcagaggccgaggccgcctcggcctctgagctattccagaagtagtgaggaggcttttttggaggcctaggcttttgcaaaaagcttggacacaagacaggcttgcgagatatgtttgagaataccactttatcccgcgtcagggagaggcagtgcgtaaaaagacgcggactcatgtgaaatactggtttttagtgcgccagatctctataatctcgcgcaacctattttcccctcgaacactttttaagccgtagataaacaggctgggacacttcacatgagcgaaaaatacatcgtcacctgggacatgttgcagatccatgcacgtaaactcgcaagccgactgatgccttctgaacaatggaaaggcattattgccgtaagccgtggcggtctgtaccgggtgcgttactggcgcgtgaactgggtattcgtcatgtcgataccgtttgtatttccagctacgatcacgacaaccagcgcgagcttaaagtgctgaaacgcgcagaaggcgatggcgaaggcttcatcgttattgatgacctggtggataccggtggtactgcggttgcgattcgtgaaatgtatccaaaagcgcactttgtcaccatcttcgcaaaaccggctggtcgtccgctggttgatgactatgttgttgatatcccgcaagatacctggattgaacagccgtgggatatgggcgtcgtattcgtcccgccaatctccggtcgctaatcttttcaacgcctggcactgccgggcgttgttctttttaacttcaggcgggttacaatagtttccagtaagtattctggaggctgcatccatgacacaggcaaacctgagcgaaaccctgttcaaaccccgctttaaacatcctgaaacctcgacgctagtccgccgctttaatcacggcgcacaaccgcctgtgcagtcggcccttgatggtaaaaccatccctcactggtatcgcatgattaaccgtctgatgtggatctggcgcggcattgacccacgcgaaatcctcgacgtccaggcacgtattgtgatgagcgatgccgaacgtaccgacgatgatttatacgatacggtgattggctaccgtggcggcaactggatttatgagtgggccccggatctttgtgaaggaaccttacttctgtggtgtgacataattggacaaactacctacagagatttaaagctctaaggtaaatataaaatttttaagtgtataatgtgttaaactactgattctaattgtttgtgtattttagattccaacctatggaactgatgaatgggagcagtggtggaatgcctttaatgaggaaaacctgttttgctcagaagaaatgccatctagtgatgatgaggctactgctgactctcaacattctactcctccaaaaaagaagagaaaggtagaagaccccaaggactttccttcagaattgctaagttttttgagtcatgctgtgtttagtaatagaactcttgcttgctttgctatttacaccacaaaggaaaaagctgcactgctatacaagaaaattatggaaaaatattctgtaacctttataagtaggcataacagttataatcataacatactgttttttcttactccacacaggcatagagtgtctgctattaataactatgctcaaaaattgtgtacctttagctttttaatttgtaaaggggttaataaggaatatttgatgtatagtgccttgactagagatcataatcagccataccacatttgtagaggttttacttgctttaaaaaacctcccacacctccccctgaacctgaaacataaaatgaatgcaattgttgttgttaacttgtttattgcagcttataatggttacaaataaagcaatagcatcacaaatttcacaaataaagcatttttttcactgcattctagttgtggtttgtccaaactcatcaatgtatcttatcatgtctggatcaactggataactcaagctaaccaaaatcatcccaaacttcccaccccataccctattaccactgccaattacctagtggtttcatttactctaaacctgtgattcctctgaattattttcattttaaagaaattgtatttgttaaatatgtactacaaacttagtagtt

SEQ ID NO: 170 - DNA, 11451 bp, synthetic construct
  source 1..11451: mol_type = other DNA
ggaagggctaattcactcccaaagaagacaagatatccttgatctgtggatctaccacacacaaggctacttccctgattagcagaactacacaccagggccaggggtcagatatccactgacctttggatggtgctacaagctagtaccagttgagccagataaggtagaagaggccaataaaggagagaacaccagcttgttacaccctgtgagcctgcatgggatggatgacccggagagagaagtgttagagtggaggtttgacagccgcctagcatttcatcacgtggcccgagagctgcatccggagtacttcaagaactgctgatatcgagcttgctacaagggactttccgctggggactttccagggaggcgtggcctgggcgggactggggagtggcgagccctcagatcctgcatataagcagctgctttttgcctgtactgggtctctctggttagaccagatctgagcctgggagctctctggctaactagggaacccactgcttaagcctcaataaagcttgccttgagtgcttcaagtagtgtgtgcccgtctgttgtgtgactctggtaactagagatccctcagacccttttagtcagtgtggaaaatctctagcagtggcgcccgaacagggacttgaaagcgaaagggaaaccagaggagctctctcgacgcaggactcggcttgctgaagcgcgcacggcaagaggcgaggggcggcgactggtgagtacgccaaaaattttgactagcggaggctagaaggagagagatgggtgcgagagcgtcagtattaagcgggggagaattagatcgcgatgggaaaaaattcggttaaggccagggggaaagaaaaaatataaattaaaacatatagtatgggcaagcagggagctagaacgattcgcagttaatcctggcctgttagaaacatcagaaggctgtagacaaatactgggacagctacaaccatcccttcagacaggatcagaagaacttagatcattatataatacagtagcaaccctctattgtgtgcatcaaaggatagagataaaagacaccaaggaagctttagacaagatagaggaagagcaaaacaaaagtaagaccaccgcacagcaagcggccggccgctgatcttcagacctggacgatatatatgagggacaattggagaagtgaattatataaatataaagtagtaaaaattgaaccattaggagtagcacccaccaaggcaaagagaagagtggtgcagagagaaaaaagagcagtgggaataggagctttgttccttgggttcttgggagcagcaggaagcactatgggcgcagcgtcaatgacgctgacggtacaggccagacaattattgtctggtatagtgcagcagcagaacaatttgctgagggctattgaggcgcaacagcatctgttgcaactcacagtctggggcatcaagcagctccaggcaagaatcctggctgtggaaagatacctaaaggatcaacagctcctggggatttggggttgctctggaaaactcatttgcaccactgctgtgccttggaatgctagttggagtaataaatctctggaacagatttggaatcacacgacctggatggagtgggacagagaaattaacaattacacaagcttaatacactccttaattgaagaatcgcaaaaccagcaagaaaagaatgaacaagaattattggaattagataaatgggcaagtttgtggaattggtttaacataacaaattggctgtggtatataaaattattcataatgatagtaggaggcttggtaggtttaagaatagtttttgctgtactttctatagtgaatagagttaggcagggatattcaccattatcgtttcagacccacctcccaaccccgaggggacccgacaggcccgaaggaatagaagaagaaggtggagagagagacagagacagatccattcgattagtgaacggatctcgacggtatcgccaaatggcagtattcatccacaattttaaaagaaaaggggggattggggggtacagtgcaggggaaagaatagtagacataatagcaacagacatacaaactaaagaattacaaaaacaaattacaaaaattcaaaattttcgggtttattacagggacagcagagatccagtttggatcgataagcttgatatcgaattcgagtcaatgggaaaaacccattggagccaagtacactgactcaatagggactttccattgggttttgcccagtacataaggtcaatagggggtgagtcaacaggaaagtcccattggagccaagtacattgagtcaatagggactttccaatgggttttgcccagtacataaggtcaatgggaggtaagccaatgggtttttcccattactgacatgtatactgagtcattagggactttccaatgggttttgcccagtacataaggtcaataggggtgaatcaacaggaaagtcccattggagccaagtacactgagtcaatagggactttccattgggttttgcccagtacaaaaggtcaatagggggtgagtcaatgggtttttcccattattggcacatacataaggtcaataggggtgactagtggagaagagcatgcttgagggctgagtgcccctcagtgggcagagagcacatggcccacagtccctgagaagttggggggaggggtgggcaattgaactggtgcctagagaaggtggggcttgggtaaactgggaaagtgatgtggtgtactggctccacctttttccccagggtgggggagaaccatatataagtgcagtagtctctgtgaacattcaagcttctgccttctccctcctgtgagtttgggatccgccatggccttaccagtgaccgccttgctcctgccgctggccttgctgctccacgccgccaggccggactacaaagaccatgacggtgattataaagatcatgacatcgattacaaggatgacgatgacaagagctatgtactgactcagcctcccagcgtctcagtagctccgggacagactgcccggataacgtgcggagggaataacatcgggtcaaagagcgttcattggtatcaacagccccccggacaagcgccagtcgtcgttgtctatgacgatagtgacaggccctcaggaatccccgaacgcttctcagggtcaaacagcggcaacacagcgactttgaccatcagtcgagtcgaggctggcgatgaggctgtatattattgccaagtctgggactcctcatccgaccatgtcgtattcggaggaggcacaaagctgacagtgctgggcggtggcggctcaggaggcgggggatcaggcggaggtgggagtcagctccagcttcaagaaagtgggcctggtctggttaagcccagcgaaaccttgagcctcacttgcacagttagcggagggtcaattagttcaggaagttacttctggggttggatcagacagcccccaggcaaagggttggaatggatcggctcaatatactacagtggcataacgtactacaacccctctctgaaaagtagagtaaccatatcagtcgatacctctaaaaaccaattctcacttaagctctcaagcgttactgccgctgataccgcagtatattattgcgccagacacgatggagcagtagctggactctttgactattggggtcaaggaactttggtaacggtaagcagcgggaattctattgaagttatgtatcctcctccttacctagacaatgagaagagcaatggaaccattatccatgtgaaagggaaacacctttgtccaagtcccctatttcccggaccttctaagcccttttgggtgctggtggtggttgggggagtcctggcttgctatagcttgctagtaacagtggcctttattattttctgggttaaacggggcagaaagaaactcctgtatatattcaaacaaccatttatgagaccagtacaaactactcaagaggaagatggctgtagctgccgatttccagaagaagaagaaggaggatgtgaactgagagtgaagttcagcaggagcgcagacgcccccgcgtacaagcagggccagaaccagctctataacgagctcaatctaggacgaagagaggagtacgatgttttggacaagagacgtggccgggaccctgagatggggggaaagccgagaaggaagaaccctcaggaaggcctgtacaatgaactgcagaaagataagatggcggaggcctacagtgagattgggatgaaaggcgagcgccggaggggcaaggggcacgatggcctttaccagggtctcagtacagccaccaaggacacctacgacgcccttcacatgcaggccctgccccctcgcgtcggaagcggagctactaacttcagcctgctgaagcaggctggagatgtggaagagaaccctggacctagatccatggccacaaccatggtgagcaagggcgaggagctgttcaccggggtggtgcccatcctggtcgagctggacggcgacgtaaacggccacaagttcagcgtgtccggcgagggcgagggcgatgccacctacggcaagctgaccctgaagttcatctgcaccaccggcaagctgcccgtgccctggcccaccctcgtgaccaccttgacctacggcgtgcagtgcttcgcccgctaccccgaccacatgaagcagcacgacttcttcaagtccgccatgcccgaaggctacgtccaggagcgcaccatcttcttcaaggacgacggcaactacaagacccgcgccgaggtgaagttcgagggcgacaccctggtgaaccgcatcgagctgaagggcatcgacttcaaggaggacggcaacatcctggggcacaagctggagtacaactacaacagccacaaggtctatatcaccgccgacaagcagaagaacggcatcaaggtgaacttcaagacccgccacaacatcgaggacggcagcgtgcagctcgccgaccactaccagcagaacacccccatcggcgacggccccgtgctgctgcccgacaaccactacctgagcacccagtccgccctgagcaaagaccccaacgagaagcgcgatcacatggtcctgctggagttcgtgaccgccgccgggatcactctcggcatggacgagctgtacaagtaagcggccgcgactctagagtcgacctgcaggcatgcaagcttgatatcaagcttatcgataatcaacctctggattacaaaatttgtgaaagattgactggtattcttaactatgttgctccttttacgctatgtggatacgctgctttaatgcctttgtatcatgctattgcttcccgtatggctttcattttctcctccttgtataaatcctggttgctgtctctttatgaggagttgtggcccgttgtcaggcaacgtggcgtggtgtgcactgtgtttgctgacgcaacccccactggttggggcattgccaccacctgtcagctcctttccgggactttcgctttccccctccctattgccacggcggaactcatcgccgcctgccttgcccgctgctggacaggggctcggctgttgggcactgacaattccgtggtgttgtcggggaaatcatcgtcctttccttggctgctcgcctgtgttgccacctggattctgcgcgggacgtccttctgctacgtcccttcggccctcaatccagcggaccttccttcccgcggcctgctgccggctctgcggcctcttccgcgtcttcgccttcgccctcagacgagtcggatctccctttgggccgcctccccgcatcgataccgtcgacctcgatcgagggaattaattcgagctcggtacctttaagaccaatgacttacaaggcagctgtagatcttagccactttttaaaagaaaaggggggactggaagggctaattcactcccaacgaagacaagatctgctttttgcttgtactgggtctctctggttagaccagatctgagcctgggagctctctggctaactagggaacccactgcttaagcctcaataaagcttgccttgagtgcttcaagtagtgtgtgcccgtctgttgtgtgactctggtaactagagatccctcagacccttttagtcagtgtggaaaatctctagcagcatctagaattaattccgtgtattctatagtgtcacctaaatcgtatgtgtatgatacataaggttatgtattaattgtagccgcgttctaacgacaatatgtacaagcctaattgtgtagcatctggcttactgaagcagaccctatcatctctctcgtaaactgccgtcagagtcggtttggttggacgaaccttctgagtttctggtaacgccgtcccgcacccggaaatggtcagcgaaccaatcagcagggtcatcgctagccagatcctctacgccggacgcatcgtggccggcatcaccggcgccacaggtgcggttgctggcgcctatatcgccgacatcaccgatggggaagatcgggctcgccacttcgggctcatgagcgcttgtttcggcgtgggtatggtggcaggccccgtggccgggggactgttgggcgccatctccttgcatgcaccattccttgcggcggcggtgctcaacggcctcaacctactactgggctgcttcctaatgcaggagtcgcataagggagagcgtcgaatggtgcactctcagtacaatctgctctgatgccgcatagttaagccagccccgacacccgccaacacccgctgacgcgccctgacgggcttgtctgctcccggcatccgcttacagacaagctgtgaccgtctccgggagctgcatgtgtcagaggttttcaccgtcatcaccgaaacgcgcgagacgaaagggcctcgtgatacgcctatttttataggttaatgtcatgataataatggtttcttagacgtcaggtggcacttttcggggaaatgtgcgcggaacccctatttgtttatttttctaaatacattcaaatatgtatccgctcatgagacaataaccctgataaatgcttcaataatattgaaaaaggaagagtatgagtattcaacatttccgtgtcgcccttattcccttttttgcggcattttgccttcctgtttttgctcacccagaaacgctggtgaaagtaaaagatgctgaagatcagttgggtgcacgagtgggttacatcgaactggatctcaacagcggtaagatccttgagagttttcgccccgaagaacgttttccaatgatgagcacttttaaagttctgctatgtggcgcggtattatcccgtattgacgccgggcaagagcaactcggtcgccgcatacactattctcagaatgacttggttgagtactcaccagtcacagaaaagcatcttacggatggcatgacagtaagagaattatgcagtgctgccataaccatgagtgataacactgcggccaacttacttctgacaacgatcggaggaccgaaggagctaaccgcttttttgcacaacatgggggatcatgtaactcgccttgatcgttgggaaccggagctgaatgaagccataccaaacgacgagcgtgacaccacgatgcctgtagcaatggcaacaacgttgcgcaaactattaactggcgaactacttactctagcttcccggcaacaattaatagactggatggaggcggataaagttgcaggaccacttctgcgctcggcccttccggctggctggtttattgctgataaatctggagccggtgagcgtgggtctcgcggtatcattgcagcactggggccagatggtaagccctcccgtatcgtagttatctacacgacggggagtcaggcaactatggatgaacgaaatagacagatcgctgagataggtgcctcactgattaagcattggtaactgtcagaccaagtttactcatatatactttagattgatttaaaacttcatttttaatttaaaaggatctaggtgaagatcctttttgataatctcatgaccaaaatcccttaacgtgagttttcgttccactgagcgtcagaccccgtagaaaagatcaaaggatcttcttgagatcctttttttctgcgcgtaatctgctgcttgcaaacaaaaaaaccaccgctaccagcggtggtttgtttgccggatcaagagctaccaactctttttccgaaggtaactggcttcagcagagcgcagataccaaatactgttcttctagtgtagccgtagttaggccaccacttcaagaactctgtagcaccgcctacatacctcgctctgctaatcctgttaccagtggctgctgccagtggcgataagtcgtgtcttaccgggttggactcaagacgatagttaccggataaggcgcagcggtcgggctgaacggggggttcgtgcacacagcccagcttggagcgaacgacctacaccgaactgagatacctacagcgtgagctatgagaaagcgccacgcttcccgaagggagaaaggcggacaggtatccggtaagcggcagggtcggaacaggagagcgcacgagggagcttccagggggaaacgcctggtatctttatagtcctgtcgggtttcgccacctctgacttgagcgtcgatttttgtgatgctcgtcaggggggcggagcctatggaaaaacgccagcaacgcggcctttttacggttcctggccttttgctggccttttgctcacatgttctttcctgcgttatcccctgattctgtggataaccgtattaccgcctttgagtgagctgataccgctcgccgcagccgaacgaccgagcgcagcgagtcagtgagcgaggaagcggaagagcgcccaatacgcaaaccgcctctccccgcgcgttggccgattcattaatgcagctgtggaatgtgtgtcagttagggtgtggaaagtccccaggctccccagcaggcagaagtatgcaaagcatgcatctcaattagtcagcaaccaggtgtggaaagtccccaggctccccagcaggcagaagtatgcaaagcatgcatctcaattagtcagcaaccatagtcccgcccctaactccgcccatcccgcccctaactccgcccagttccgcccattctccgccccatggctgactaattttttttatttatgcagaggccgaggccgcctcggcctctgagctattccagaagtagtgaggaggcttttttggaggcctaggcttttgcaaaaagcttggacacaagacaggcttgcgagatatgtttgagaataccactttatcccgcgtcagggagaggcagtgcgtaaaaagacgcggactcatgtgaaatactggtttttagtgcgccagatctctataatctcgcgcaacctattttcccctcgaacactttttaagccgtagataaacaggctgggacacttcacatgagcgaaaaatacatcgtcacctgggacatgttgcagatccatgcacgtaaactcgcaagccgactgatgccttctgaacaatggaaaggcattattgccgtaagccgtggcggtctgtaccgggtgcgttactggcgcgtgaactgggtattcgtcatgtcgataccgtttgtatttccagctacgatcacgacaaccagcgcgagcttaaagtgctgaaacgcgcagaaggcgatggcgaaggcttcatcgttattgatgacctggtggataccggtggtactgcggttgcgattcgtgaaatgtatccaaaagcgcactttgtcaccatcttcgcaaaaccggctggtcgtccgctggttgatgactatgttgttgatatcccgcaagatacctggattgaacagccgtgggatatgggcgtcgtattcgtcccgccaatctccggtcgctaatcttttcaacgcctggcactgccgggcgttgttctttttaacttcaggcgggttacaatagtttccagtaagtattctggaggctgcatccatgacacaggcaaacctgagcgaaaccctgttcaaaccccgctttaaacatcctgaaacctcgacgctagtccgccgctttaatcacggcgcacaaccgcctgtgcagtcggcccttgatggtaaaaccatccctcactggtatcgcatgattaaccgtctgatgtggatctggcgcggcattgacccacgcgaaatcctcgacgtccaggcacgtattgtgatgagcgatgccgaacgtaccgacgatgatttatacgatacggtgattggctaccgtggcggcaactggatttatgagtgggccccggatctttgtgaaggaaccttacttctgtggtgtgacataattggacaaactacctacagagatttaaagctctaaggtaaatataaaatttttaagtgtataatgtgttaaactactgattctaattgtttgtgtattttagattccaacctatggaactgatgaatgggagcagtggtggaatgcctttaatgaggaaaacctgttttgctcagaagaaatgccatctagtgatgatgaggctactgctgactctcaacattctactcctccaaaaaagaagagaaaggtagaagaccccaaggactttccttcagaattgctaagttttttgagtcatgctgtgtttagtaatagaactcttgcttgctttgctatttacaccacaaaggaaaaagctgcactgctatacaagaaaattatggaaaaatattctgtaacctttataagtaggcataacagttataatcataacatactgttttttcttactccacacaggcatagagtgtctgctattaataactatgctcaaaaattgtgtacctttagctttttaatttgtaaaggggttaataaggaatatttgatgtatagtgccttgactagagatcataatcagccataccacatttgtagaggttttacttgctttaaaaaacctcccacacctccccctgaacctgaaacataaaatgaatgcaattgttgttgttaacttgtttattgcagcttataatggttacaaataaagcaatagcatcacaaatttcacaaataaagcatttttttcactgcattctagttgtggtttgtccaaactcatcaatgtatcttatcatgtctggatcaactggataactcaagctaaccaaaatcatcccaaacttcccaccccataccctattaccactgccaattacctagtggtttcatttactctaaacctgtgattcctctgaattattttcattttaaagaaattgtatttgttaaatatgtactacaaacttagtagtt

SEQ ID NO: 171 - protein, 141 aa, synthetic construct
KEICGDPVTDNVKDITKLVANLPNDYMITLNYVAGMDVLPSHCWLRDMVIQLSLSLTTLLDKFSNISEGLSNYSIIHKLGIIVDDLFFCMEENAPKNIKEFPKRPETRSFTPEEFFSIFNRSIDAFKDFMVASDTSDCVLS

SEQ ID NO: 172 - protein, 141 aa, synthetic construct
KEICGNPVTDNVKDITKLVANLPNDYMITLNYVAGMDVLPSHCWLRDMVIQLSLSLTTLLDKASNISEGLSNYSIIDKLGKIVDDLVLCMEENAPKNIKESPKRPETRSFTPEEFFSIFNRSIDAFKDFMVASDTSDCVLS

SEQ ID NO: 173 - protein, 141 aa, synthetic construct
KEICGDPVTDNVKDITKLVANLPNDYMITLNYVAGMDVLPSHCWLRDMVIQLSLSLTTLLDKASNISEGLSNYSIIHKLGIIVDDLFFCMEENAPKNIKEFPKRPETRSFTPEEFFSIFNRSIDAFKDFMVASDTSDCVLS

SEQ ID NO: 174 - protein, 236 aa, synthetic construct
MVSKGEEDNMASLPATHELHIFGSINGVDFDMVGQGTGNPNDGYEELNLKSTKGDLQFSPWILVPHIGYGFHQYLPYPDGMSPFQAAMVDGSGYQVHRTMQFEDGASLTVNYRYTYEGSHIKGEAQVKGTGFPADGPVMTNSLTAADWCRSKKTYPNDKTIISTFKWSYTTGNGKRYRSTARTTYTFAKPMAANYLKNQPMYVFRKTELKHSKTELNFKEWQKAFTDVMGMDELYK

SEQ ID NO: 175 - protein, 16 aa, synthetic construct
CPPCPAPELLGGPSVF

SEQ ID NO: 176 - DNA, 9669 bp, synthetic construct
  source 1..9669: mol_type = other DNA
ggaagggctaattcactcccaaagaagacaagatatccttgatctgtggatctaccacacacaaggctacttccctgattagcagaactacacaccagggccaggggtcagatatccactgacctttggatggtgctacaagctagtaccagttgagccagataaggtagaagaggccaataaaggagagaacaccagcttgttacaccctgtgagcctgcatgggatggatgacccggagagagaagtgttagagtggaggtttgacagccgcctagcatttcatcacgtggcccgagagctgcatccggagtacttcaagaactgctgatatcgagcttgctacaagggactttccgctggggactttccagggaggcgtggcctgggcgggactggggagtggcgagccctcagatcctgcatataagcagctgctttttgcctgtactgggtctctctggttagaccagatctgagcctgggagctctctggctaactagggaacccactgcttaagcctcaataaagcttgccttgagtgcttcaagtagtgtgtgcccgtctgttgtgtgactctggtaactagagatccctcagacccttttagtcagtgtggaaaatctctagcagtggcgcccgaacagggacttgaaagcgaaagggaaaccagaggagctctctcgacgcaggactcggcttgctgaagcgcgcacggcaagaggcgaggggcggcgactggtgagtacgccaaaaattttgactagcggaggctagaaggagagagatgggtgcgagagcgtcagtattaagcgggggagaattagatcgcgatgggaaaaaattcggttaaggccagggggaaagaaaaaatataaattaaaacatatagtatgggcaagcagggagctagaacgattcgcagttaatcctggcctgttagaaacatcagaaggctgtagacaaatactgggacagctacaaccatcccttcagacaggatcagaagaacttagatcattatataatacagtagcaaccctctattgtgtgcatcaaaggatagagataaaagacaccaaggaagctttagacaagatagaggaagagcaaaacaaaagtaagaccaccgcacagcaagcggccggccgctgatcttcagacctggaggaggagatatgagggacaattggagaagtgaattatataaatataaagtagtaaaaattgaaccattaggagtagcacccaccaaggcaaagagaagagtggtgcagagagaaaaaagagcagtgggaataggagctttgttccttgggttcttgggagcagcaggaagcactatgggcgcagcgtcaatgacgctgacggtacaggccagacaattattgtctggtatagtgcagcagcagaacaatttgctgagggctattgaggcgcaacagcatctgttgcaactcacagtctggggcatcaagcagctccaggcaagaatcctggctgtggaaagatacctaaaggatcaacagctcctggggatttggggttgctctggaaaactcatttgcaccactgctgtgccttggaatgctagttggagtaataaatctctggaacagatttggaatcacacgacctggatggagtgggacagagaaattaacaattacacaagcttaatacactccttaattgaagaatcgcaaaaccagcaagaaaagaatgaacaagaattattggaattagataaatgggcaagtttgtggaattggtttaacataacaaattggctgtggtatataaaattattcataatgatagtaggaggcttggtaggtttaagaatagtttttgctgtactttctatagtgaatagagttaggcagggatattcaccattatcgtttcagacccacctcccaaccccgaggggacccgacaggcccgaaggaatagaagaagaaggtggagagagagacagagacagatccattcgattagtgaacggatctcgacggtatcgccaaatggcagtattcatccacaattttaaaagaaaaggggggattggggggtacagtgcaggggaaagaatagtagacataatagcaacagacatacaaactaaagaattacaaaaacaaattacaaaaattcaaaattttcgggtttattacagggacagcagagatccagtttggatcgataagcttgatatcgaattcctgcagccccgataaaataaaagattttatttagtctccagaaaaaggggggaatgaaagaccccacctgtaggtttggcaagctagctgcagtaacgccattttgcaaggcatggaaaaataccaaaccaagaatagagaagttcagatcaagggcgggtacatgaaaatagctaacgttgggccaaacaggatatctgcggtgagcagtttcggccccggcccggggccaagaacagatggtcaccgcagtttcggccccggcccgaggccaagaacagatggtccccagatatggcccaaccctcagcagtttcttaagacccatcagatgtttccaggctcccccaaggacctgaaatgaccctgcgccttatttgaattaaccaatcagcctgcttctcgcttctgttcgcgcgcttctgcttcccgagctctataaaagagctcacaacccctcactcggcgcgccagtcctccgacagactgagtcgcccgggggggatccaccggtcgccaccatggtgagcaagggcgaggagctgttcaccggggtggtgcccatcctggtcgagctggacggcgacgtaaacggccacaagttcagcgtgtccggcgagggcgagggcgatgccacctacggcaagctgaccctgaagttcatctgcaccaccggcaagctgcccgtgccctggcccaccctcgtgaccaccctgacctacggcgtgcagtgcttcagccgctaccccgaccacatgaagcagcacgacttcttcaagtccgccatgcccgaaggctacgtccaggagcgcaccatcttcttcaaggacgacggcaactacaagacccgcgccgaggtgaagttcgagggcgacaccctggtgaaccgcatcgagctgaagggcatcgacttcaaggaggacggcaacatcctggggcacaagctggagtacaactacaacagccacaacgtctatatcatggccgacaagcagaagaacggcatcaaggtgaacttcaagatccgccacaacatcgaggacggcagcgtgcagctcgccgaccactaccagcagaacacccccatcggcgacggccccgtgctgctgcccgacaaccactacctgagcacccagtccgccctgagcaaagaccccaacgagaagcgcgatcacatggtcctgctggagttcgtgaccgccgccgggatcactctcggcatggacgagctgtacaagtaaagcggccgcgactctagagtcgacctgcaggcatgcaagcttgatatcaagcttatcgataatcaacctctggattacaaaatttgtgaaagattgactggtattcttaactatgttgctccttttacgctatgtggatacgctgctttaatgcctttgtatcatgctattgcttcccgtatggctttcattttctcctccttgtataaatcctggttgctgtctctttatgaggagttgtggcccgttgtcaggcaacgtggcgtggtgtgcactgtgtttgctgacgcaacccccactggttggggcattgccaccacctgtcagctcctttccgggactttcgctttccccctccctattgccacggcggaactcatcgccgcctgccttgcccgctgctggacaggggctcggctgttgggcactgacaattccgtggtgttgtcggggaaatcatcgtcctttccttggctgctcgcctgtgttgccacctggattctgcgcgggacgtccttctgctacgtcccttcggccctcaatccagcggaccttccttcccgcggcctgctgccggctctgcggcctcttccgcgtcttcgccttcgccctcagacgagtcggatctccctttgggccgcctccccgcatcgataccgtcgacctcgatcgagggaattaattcgagctcggtacctttaagaccaatgacttacaaggcagctgtagatcttagccactttttaaaagaaaaggggggactggaagggctaattcactcccaacgaagacaagatctgctttttgcttgtactgggtctctctggttagaccagatctgagcctgggagctctctggctaactagggaacccactgcttaagcctcaataaagcttgccttgagtgcttcaagtagtgtgtgcccgtctgttgtgtgactctggtaactagagatccctcagacccttttagtcagtgtggaaaatctctagcagcatctagaattaattccgtgtattctatagtgtcacctaaatcgtatgtgtatgatacataaggttatgtattaattgtagccgcgttctaacgacaatatgtacaagcctaattgtgtagcatctggcttactgaagcagaccctatcatctctctcgtaaactgccgtcagagtcggtttggttggacgaaccttctgagtttctggtaacgccgtcccgcacccggaaatggtcagcgaaccaatcagcagggtcatcgctagccagatcctctacgccggacgcatcgtggccggcatcaccggcgccacaggtgcggttgctggcgcctatatcgccgacatcaccgatggggaagatcgggctcgccacttcgggctcatgagcgcttgtttcggcgtgggtatggtggcaggccccgtggccgggggactgttgggcgccatctccttgcatgcaccattccttgcggcggcggtgctcaacggcctcaacctactactgggctgcttcctaatgcaggagtcgcataagggagagcgtcgaatggtgcactctcagtacaatctgctctgatgccgcatagttaagccagccccgacacccgccaacacccgctgacgcgccctgacgggcttgtctgctcccggcatccgcttacagacaagctgtgaccgtctccgggagctgcatgtgtcagaggttttcaccgtcatcaccgaaacgcgcgagacgaaagggcctcgtgatacgcctatttttataggttaatgtcatgataataatggtttcttagacgtcaggtggcacttttcggggaaatgtgcgcggaacccctatttgtttatttttctaaatacattcaaatatgtatccgctcatgagacaataaccctgataaatgcttcaataatattgaaaaaggaagagtatgagtattcaacatttccgtgtcgcccttattcccttttttgcggcattttgccttcctgtttttgctcacccagaaacgctggtgaaagtaaaagatgctgaagatcagttgggtgcacgagtgggttacatcgaactggatctcaacagcggtaagatccttgagagttttcgccccgaagaacgttttccaatgatgagcacttttaaagttctgctatgtggcgcggtattatcccgtattgacgccgggcaagagcaactcggtcgccgcatacactattctcagaatgacttggttgagtactcaccagtcacagaaaagcatcttacggatggcatgacagtaagagaattatgcagtgctgccataaccatgagtgataacactgcggccaacttacttctgacaacgatcggaggaccgaaggagctaaccgcttttttgcacaacatgggggatcatgtaactcgccttgatcgttgggaaccggagctgaatgaagccataccaaacgacgagcgtgacaccacgatgcctgtagcaatggcaacaacgttgcgcaaactattaactggcgaactacttactctagcttcccggcaacaattaatagactggatggaggcggataaagttgcaggaccacttctgcgctcggcccttccggctggctggtttattgctgataaatctggagccggtgagcgtgggtctcgcggtatcattgcagcactggggccagatggtaagccctcccgtatcgtagttatctacacgacggggagtcaggcaactatggatgaacgaaatagacagatcgctgagataggtgcctcactgattaagcattggtaactgtcagaccaagtttactcatatatactttagattgatttaaaacttcatttttaatttaaaaggatctaggtgaagatcctttttgataatctcatgaccaaaatcccttaacgtgagttttcgttccactgagcgtcagaccccgtagaaaagatcaaaggatcttcttgagatcctttttttctgcgcgtaatctgctgcttgcaaacaaaaaaaccaccgctaccagcggtggtttgtttgccggatcaagagctaccaactctttttccgaaggtaactggcttcagcagagcgcagataccaaatactgttcttctagtgtagccgtagttaggccaccacttcaagaactctgtagcaccgcctacatacctcgctctgctaatcctgttaccagtggctgctgccagtggcgataagtcgtgtcttaccgggttggactcaagacgatagttaccggataaggcgcagcggtcgggctgaacggggggttcgtgcacacagcccagcttggagcgaacgacctacaccgaactgagatacctacagcgtgagctatgagaaagcgccacgcttcccgaagggagaaaggcggacaggtatccggtaagcggcagggtcggaacaggagagcgcacgagggagcttccagggggaaacgcctggtatctttatagtcctgtcgggtttcgccacctctgacttgagcgtcgatttttgtgatgctcgtcaggggggcggagcctatggaaaaacgccagcaacgcggcctttttacggttcctggccttttgctggccttttgctcacatgttctttcctgcgttatcccctgattctgtggataaccgtattaccgcctttgagtgagctgataccgctcgccgcagccgaacgaccgagcgcagcgagtcagtgagcgaggaagcggaagagcgcccaatacgcaaaccgcctctccccgcgcgttggccgattcattaatgcagctgtggaatgtgtgtcagttagggtgtggaaagtccccaggctccccagcaggcagaagtatgcaaagcatgcatctcaattagtcagcaaccaggtgtggaaagtccccaggctccccagcaggcagaagtatgcaaagcatgcatctcaattagtcagcaaccatagtcccgcccctaactccgcccatcccgcccctaactccgcccagttccgcccattctccgccccatggctgactaattttttttatttatgcagaggccgaggccgcctcggcctctgagctattccagaagtagtgaggaggcttttttggaggcctaggcttttgcaaaaagcttggacacaagacaggcttgcgagatatgtttgagaataccactttatcccgcgtcagggagaggcagtgcgtaaaaagacgcggactcatgtgaaatactggtttttagtgcgccagatctctataatctcgcgcaacctattttcccctcgaacactttttaagccgtagataaacaggctgggacacttcacatgagcgaaaaatacatcgtcacctgggacatgttgcagatccatgcacgtaaactcgcaagccgactgatgccttctgaacaatggaaaggcattattgccgtaagccgtggcggtctgtaccgggtgcgttactggcgcgtgaactgggtattcgtcatgtcgataccgtttgtatttccagctacgatcacgacaaccagcgcgagcttaaagtgctgaaacgcgcagaaggcgatggcgaaggcttcatcgttattgatgacctggtggataccggtggtactgcggttgcgattcgtgaaatgtatccaaaagcgcactttgtcaccatcttcgcaaaaccggctggtcgtccgctggttgatgactatgttgttgatatcccgcaagatacctggattgaacagccgtgggatatgggcgtcgtattcgtcccgccaatctccggtcgctaatcttttcaacgcctggcactgccgggcgttgttctttttaacttcaggcgggttacaatagtttccagtaagtattctggaggctgcatccatgacacaggcaaacctgagcgaaaccctgttcaaaccccgctttaaacatcctgaaacctcgacgctagtccgccgctttaatcacggcgcacaaccgcctgtgcagtcggcccttgatggtaaaaccatccctcactggtatcgcatgattaaccgtctgatgtggatctggcgcggcattgacccacgcgaaatcctcgacgtccaggcacgtattgtgatgagcgatgccgaacgtaccgacgatgatttatacgatacggtgattggctaccgtggcggcaactggatttatgagtgggccccggatctttgtgaaggaaccttacttctgtggtgtgacataattggacaaactacctacagagatttaaagctctaaggtaaatataaaatttttaagtgtataatgtgttaaactactgattctaattgtttgtgtattttagattccaacctatggaactgatgaatgggagcagtggtggaatgcctttaatgaggaaaacctgttttgctcagaagaaatgccatctagtgatgatgaggctactgctgactctcaacattctactcctccaaaaaagaagagaaaggtagaagaccccaaggactttccttcagaattgctaagttttttgagtcatgctgtgtttagtaatagaactcttgcttgctttgctatttacaccacaaaggaaaaagctgcactgctatacaagaaaattatggaaaaatattctgtaacctttataagtaggcataacagttataatcataacatactgttttttcttactccacacaggcatagagtgtctgctattaataactatgctcaaaaattgtgtacctttagctttttaatttgtaaaggggttaataaggaatatttgatgtatagtgccttgactagagatcataatcagccataccacatttgtagaggttttacttgctttaaaaaacctcccacacctccccctgaacctgaaacataaaatgaatgcaattgttgttgttaacttgtttattgcagcttataatggttacaaataaagcaatagcatcacaaatttcacaaataaagcatttttttcactgcattctagttgtggtttgtccaaactcatcaatgtatcttatcatgtctggatcaactggataactcaagctaaccaaaatcatcccaaacttcccaccccataccctattaccactgccaattacctgtggtttcatttactctaaacctgtgattcctctgaattattttcattttaaagaaattgtatttgttaaatatgtactacaaacttagtagtt

SEQ ID NO: 177 - DNA, 6902 bp, synthetic construct
  source 1..6902: mol_type = other DNA
ggaattcgagctcgccccgttacataacttacggtaaatggcccgcctggctgaccgcccaacgacccccgcccattgacgtcaataatgacgtatgttcccatagtaacgccaatagggactttccattgacgtcaatgggtggagtatttacggtaaactgcccacttggcagtacatcaagtgtatcatatgccaagtacgccccctattgacgtcaatgacggtaaatggcccgcctggcattatgcccagtacatgaccttatgggactttcctacttggcagtacatctacgtattagtcatcgctattaccatggtgatgcggttttggcagtacatcaatgggcgtggatagcggtttgactcacggggatttccaagtctccaccccattgacgtcaatgggagtttgttttggcaccaaaatcaacgggactttccaaaatgtcgtaacaactccgccccattgacgcaaatgggcggtaggcgtgtacggtgggaggtctatataagcagagctcgtttagtgaaccgtcagatcgcctggagacgccatccacgctgttttgacctccatagaagacaccgggaccgatccagcctccgggggatcgatccccccgatcctgagaacttcagggtgagtttggggacccttgattgttctttctttttcgctattgtaaaattcatgttatatggagggggcaaagttttcagggtgttgtttagaatgggaagatgtcccttgtatcaccatggaccctcatgataattttgtttctttcactttctactctgttgacaaccattgtctcctcttattttcttttcattttctgtaactttttcgttaaactttagcttgcatttgtaacgaatttttaaattcacttttgtttatttgtcagattgtaagtactttctctaatcacttttttttcaaggcaatcagggtatattatattgtacttcagcacagttttagagaacaattgttataattaaatgataaggtagaatatttctgcatataaattctggctggcgtggaaatattcttattggtagaaacaactacatcctggtcatcatcctgcctttctctttatggttacaatgatatacactgtttgagatgaggataaaatactctgagtccaaaccgggcccctctgctaaccatgttcatgccttcttctttttcctacagctcctgggcaacgtgctggttattgtgctgtctcatcattttggcaaagaattgtaatacgactcactatagggcgaattcggatcccccggtagttaattaatacgcgtcactatgaagtgcctgctgtacctggccttcctgttcatcggcgtgaactgcaaggacatccagatgacccagagccccagcagcctgagcgccagcgtgggcgaccgcgtgaccatcacctgccgcgccagccaggacatccgcaactacctgaactggtaccagcagaagcccggcaaggcccccaagctgctgatctactacaccagccgcctggagagcggcgtgcccagccgcttcagcggcagcggcagcggcaccgactacaccctgaccatcagcagcctgcagcccgaggacttcgccacctactactgccagcagggcaacaccctgccctggaccttcggccagggcaccaaggtggagatcaagggcggcggcggcagcggcggcggcggcagcggcggcggcggcagcgaggtgcagctggtggagagcggcggcggcctggtgcagcccggcggcagcctgcgcctgagctgcgccgccagcggctacagcttcaccggctacaccatgaactgggtgcgccaggcccccggcaagggcctggagtgggtggccctgatcaacccctacaagggcgtgagcacctacaaccagaagttcaaggaccgcttcaccatcagcgtggacaagagcaagaacaccgcctacctgcagatgaacagcctgcgcgccgaggacaccgccgtgtactactgcgcccgcagcggctactacggcgacagcgactggtacttcgacgtgtggggccagggcaccctggtgaccgtgagcagctgccccccctgccccgcccccgagctgctgggcggccccagcgtgttcaagttcacgatcgtttttccacacaaccaaaaaggaaactggaaaaatgttccttctaattaccattattgcccgtcaagctcagatttaaattggcataatgacttaataggcacagccttacaagtcaaaatgcccagtcacaaggctattcaagcagacggttggatgtgtcatgcttccaaatgggtcactacttgtgatttccgctggtatggaccgaagtatataacacattccatccgatccttcactccatctgtagaacaatgcaaggaaagcattgaacaaacgaaacaaggaacttggctgaatccaggcttccctcctcaaagttgtggatatgcaactgtgacggatgccgaagcagtgattgtccaggtgactcctcaccatgtgctggttgatgaatacacaggagaatgggttgattcacagttcatcaacggaaaatgcagcaattacatatgccccactgtccataactctacaacctggcattctgactataaggtcaaagggctatgtgattctaacctcatttccatggacatcaccttcttctcagaggacggagagctatcatccctgggaaaggagggcacagggttcagaagtaactactttgcttatgaaactggaggcaaggcctgcaaaatgcaatactgcaagcattggggagtcagactcccatcaggtgtctggttcgagatggctgataaggatctctttgctgcagccagattccctgaatgcccagaagggtcaagtatctctgctccatctcagacctcagtggatgtaagtctaattcaggacgttgagaggatcttggattattccctctgccaagaaacctggagcaaaatcagagcgggtcttccaatctctccagtggatctcagctatcttgctcctaaaaacccaggaaccggtcctgctttcaccataatcaatggtaccctaaaatactttgagaccagatacatcagagtcgatattgctgctccaatcctctcaagaatggtcggaatgatctccggaactaccacagaaagggaactgtgggatgactgggcgccatatgaagacgtggaaattggacccaatggagttctgaggaccagttcaggatataagtttcctttatacatgattggacatggtatgttggactccgatcttcatcttagctcaaaggctcaggtgttcgaacatcctcacattcaagacgctgcttcgcaacttcctgatgatgagagtttattttttggtgatactgggctatccaaaaatccaatcgagcttgtagaaggttggttcagtagttggaaaagctctattgcctcttttttctttatcatagggttaatcattggactattcttggttctccgagttggtatccatctttgcattaaattaaagcacaccaagaaaagacagatttatacagacatagagatgaaccgacttggaaagtaactcaaatcctgctaggtatgaaaaaaactaacagatatcacgcctaggactagtgtgaaatagacatcagaattaagaaaaacgtagggtccaagtggttccccgttatggactcgctatctgtcaaccagatcttataccctgaagttcacctagatagcccgatagttaccaataagatagtagccatcctggagtatgctcgactgtttaaacctgcaggcatgcaagctgatctttttccctctgccaaaaattatggggacatcatgaagccccttgagcatctgacttctggctaataaaggaaatttattttcattgcaatagtgtgttggaattttttgtgtctctcactcggaaggacatatgggagggcaaatcatttaaaacatcagaatgagtatttggtttagagtttggcaacatatgcccatatgctggctgccatgaacaaaggttggctataaagaggtcatcagtatatgaaacagccccctgctgtccattccttattccatagaaaagccttgacttgaggttagattttttttatattttgttttgtgttatttttttctttaacatccctaaaattttccttacatgttttactagccagatttttcctcctctcctgactactcccagtcatagctgtccctcttctcttatggagatccctcgaggagctttttgcaaaagcctaggcctccaaaaaagcctcttcactacttctggaatagctcagaagccgaggcggcctcggcctctgcataaataaaaaaaattagtcagccatggggcggagaatgggcggaactgggcggagttaggggcgggatgggcggagttaggggcgggactatggttgctgactaattgctgcattaatgaatcggccaacgcgcggggagaggcggtttgcgtattgggcgctcttccgcttcctcgctcactgactcgctgcgctcggtcgttcggctgcggcgagcggtatcagctcactcaaaggcggtaatacggttatccacagaatcaggggataacgcaggaaagaacatgtgagcaaaaggccagcaaaaggccaggaaccgtaaaaaggccgcgttgctggcgtttttccataggctccgcccccctgacgagcatcacaaaaatcgacgctcaagtcagaggtggcgaaacccgacaggactataaagataccaggcgtttccccctggaagctccctcgtgcgctctcctgttccgaccctgccgcttaccggatacctgtccgcctttctcccttcgggaagcgtggcgctttctcatagctcacgctgtaggtatctcagttcggtgtaggtcgttcgctccaagctgggctgtgtgcacgaaccccccgttcagcccgaccgctgcgccttatccggtaactatcgtcttgagtccaacccggtaagacacgacttatcgccactggcagcagccactggtaacaggattagcagagcgaggtatgtaggcggtgctacagagttcttgaagtggtggcctaactacggctacactagaagaacagtatttggtatctgcgctctgctgaagccagttaccttcggaaaaagagttggtagctcttgatccggcaaacaaaccaccgctggtagcggtggtttttttgtttgcaagcagcagattacgcgcagaaaaaaaggatctcaagaagatcctttgatcttttctacggggtctgacgctcagtggaacgaaaactcacgttaagggattttggtcatgagattatcaaaaaggatcttcacctagatccttttaaattaaaaatgaagttttaaatcaatctaaagtatatatgagtaaacttggtctgacagttaccaatgcttaatcagtgaggcacctatctcagcgatctgtctatttcgttcatccatagttgcctgactccccgtcgtgtagataactacgatacgggagggcttaccatctggccccagtgctgcaatgataccgcgagacccacgctcaccggctccagatttatcagcaataaaccagccagccggaagggccgagcgcagaagtggtcctgcaactttatccgcctccatccagtctattaattgttgccgggaagctagagtaagtagttcgccagttaatagtttgcgcaacgttgttgccattgctacaggcatcgtggtgtcacgctcgtcgtttggtatggcttcattcagctccggttcccaacgatcaaggcgagttacatgatcccccatgttgtgcaaaaaagcggttagctccttcggtcctccgatagttgtcagaagtaagttggccgcagtgttatcactcatggttatggcagcactgcataattctcttactgtcatgccatccgtaagatgcttttctgtgactggtgagtactcaaccaagtcattctgagaatagtgtatgcggcgaccgagttgctcttgcccggcgtcaatacgggataataccgcgccacatagcagaactttaaaagtgctcatcattggaaaacgttcttcggggcgaaaactctcaaggatcttaccgctgttgagatccagttcgatgtaacccactcgtgcacccaactgatcttcagcatcttttactttcaccagcgtttctgggtgagcaaaaacaggaaggcaaaatgccgcaaaaaagggaataagggcgacacggaaatgttgaatactcatactcttcctttttcaatattattgaagcatttatcagggttattgtctcatgagcggatacatatttgaatgtatttagaaaaataaacaaataggggttccgcgcacatttccccgaaaagtgccacctgacgtctaagaaaccattattatcatgacattaacctataaaaataggcgtatcacgaggccctttcgtctcgcgcgtttcggtgatgacggtgaaaacctctgacacatgcagctcccggagacggtcacagcttgtctgtaagcggatgccgggagcagacaagcccgtcagggcgcgtcagcgggtgttggcgggtgtcggggctggcttaactatgcggcatcagagcagattgtactgagagtgcaccattcgacgctctcccttatgcgactcctgcattaggaagcagcccagtagtaggttgaggccgttgagcaccgccgccgcaaggaatggtctggcttatcgaaattaatacgactcactatagggagacc

SEQ ID NO: 178 - DNA, 6944 bp, synthetic construct
  source 1..6944: mol_type = other DNA
ggaattcgagctcgccccgttacataacttacggtaaatggcccgcctggctgaccgcccaacgacccccgcccattgacgtcaataatgacgtatgttcccatagtaacgccaatagggactttccattgacgtcaatgggtggagtatttacggtaaactgcccacttggcagtacatcaagtgtatcatatgccaagtacgccccctattgacgtcaatgacggtaaatggcccgcctggcattatgcccagtacatgaccttatgggactttcctacttggcagtacatctacgtattagtcatcgctattaccatggtgatgcggttttggcagtacatcaatgggcgtggatagcggtttgactcacggggatttccaagtctccaccccattgacgtcaatgggagtttgttttggcaccaaaatcaacgggactttccaaaatgtcgtaacaactccgccccattgacgcaaatgggcggtaggcgtgtacggtgggaggtctatataagcagagctcgtttagtgaaccgtcagatcgcctggagacgccatccacgctgttttgacctccatagaagacaccgggaccgatccagcctccgggggatcgatccccccgatcctgagaacttcagggtgagtttggggacccttgattgttctttctttttcgctattgtaaaattcatgttatatggagggggcaaagttttcagggtgttgtttagaatgggaagatgtcccttgtatcaccatggaccctcatgataattttgtttctttcactttctactctgttgacaaccattgtctcctcttattttcttttcattttctgtaactttttcgttaaactttagcttgcatttgtaacgaatttttaaattcacttttgtttatttgtcagattgtaagtactttctctaatcacttttttttcaaggcaatcagggtatattatattgtacttcagcacagttttagagaacaattgttataattaaatgataaggtagaatatttctgcatataaattctggctggcgtggaaatattcttattggtagaaacaactacatcctggtcatcatcctgcctttctctttatggttacaatgatatacactgtttgagatgaggataaaatactctgagtccaaaccgggcccctctgctaaccatgttcatgccttcttctttttcctacagctcctgggcaacgtgctggttattgtgctgtctcatcattttggcaaagaattgtaatacgactcactatagggcgaattcggatcccccggtagttaattaatacgcgtcactatgttgtcttatttaattcttgcaattattgtttcgcctatcttaggcaagaacctgagggcggcccagccggccgaggtgcagctggtggagagcggcggcggcctggtgcagcccggcggcagcctgcgcctgagctgcgccgccagcggctacagcttcaccggctacaccatgaactgggtgcgccaggcccccggcaagggcctggagtgggtggccctgatcaacccctacaagggcgtgagcacctacaaccagaagttcaaggaccgcttcaccatcagcgtggacaagagcaagaacaccgcctacctgcagatgaacagcctgcgcgccgaggacaccgccgtgtactactgcgcccgcagcggctactacggcgacagcgactggtacttcgacgtgtggggccagggcaccctggtgaccgtgagcagcggcggcggcggcagcggcggcggcggcagcggcggcggcggcagcgacatccagatgacccagagccccagcagcctgagcgccagcgtgggcgaccgcgtgaccatcacctgccgcgccagccaggacatccgcaactacctgaactggtaccagcagaagcccggcaaggcccccaagctgctgatctactacaccagccgcctggagagcggcgtgcccagccgcttcagcggcagcggcagcggcaccgactacaccctgaccatcagcagcctgcagcccgaggacttcgccacctactactgccagcagggcaacaccctgccctggaccttcggccagggcaccaaggtggagatcaagtgccccccctgccccgcccccgagctgctgggcggccccagcgtgttcaaaattgaaatcgtcttccctcagcatactactggagattggaagagggttcctcatgaatacaattactgtcccactagcgcagataagaactcacatgggactcagacaggaattcctgttgagctaacaatgcccggactaacaacacatcaggttgatgggtttatgtgccactctgctttatggatgaccacttgtgatttcagatggtatggacctaaatacataacccattccatacataatgaggagcctacagattaccaatgtttggaagccatcaaggcatataaagatggtgttggctttaatccagggttccctcctcagagctgtgggtatggtacggtcacggacgctgaagcccatattataacagtcactcctcactctgttaaagtagatgagtacactggagaatggattgacccacatttcatcgggggcagatgcaagggcaagatttgtgaaacagtccacaactccacaaaatggtttacatcttcagatggagaaagtgtctgtagtcaattattcactctagttggaggaacttttttctctgactcagaggaaattacttcaatgggactaccagaaacagggataaggagtaattattttccttacatatccacagagggaatatgcaagatgccattctgtagaaagccagggtacaaacttaagaatgacctctggtttcagatcacagacccagatctggataaaacagttagagatcttccgcacatcaaagattgtgatctctcctcatccattataacaccaggggaacatgcaacagacatatccctgatatcagatgtggaacgaatactggattatgctctttgtcaaaacacatggggtaaaattgaagccggagaaccaatcactcctgtagatctcagctacctcggaccaaagaatcccggagtaggcccggttttcaccatcatcaatagttctttgcattacttcacatccaaatatctgcgtgtggaactggaaagtcctgttatacccagaatggaaggaagagttgcaggaactagaattgtgcggcaattgtgggatcaatggttcccttttggagaggctgagattggacctaatggtgtgttgaagaccaagcaaggatacaaattcccattacacatcattggaacaggagaggtagacagtgacatcaaaatggagaggattgttaaacactgggaacacccccatattgaagccgctcagacatatttaaaaaaagatgatacagaagaagtcatctattatggcgacacagggatctcaaaatacccagttgagttggtcgagggctggtttagtggatggaggagctctatcatgggagtggtggctgtgattatcggattcgtgattttaatatttttaattagactgattggagtcctatccagtctttttagaccaaaaagaaggccaatttataaatcggatgtagagatggctcatttccgttaactcaaatcctgctaggtatgaaaaaaactaacagatatcacgcctaggactagtgtgaaatagacatcagaattaagaaaaacgtagggtccaagtggttccccgttatggactcgctatctgtcaaccagatcttataccctgaagttcacctagatagcccgatagttaccaataagatagtagccatcctggagtatgctcgactgtttaaacctgcaggcatgcaagctgatctttttccctctgccaaaaattatggggacatcatgaagccccttgagcatctgacttctggctaataaaggaaatttattttcattgcaatagtgtgttggaattttttgtgtctctcactcggaaggacatatgggagggcaaatcatttaaaacatcagaatgagtatttggtttagagtttggcaacatatgcccatatgctggctgccatgaacaaaggttggctataaagaggtcatcagtatatgaaacagccccctgctgtccattccttattccatagaaaagccttgacttgaggttagattttttttatattttgttttgtgttatttttttctttaacatccctaaaattttccttacatgttttactagccagatttttcctcctctcctgactactcccagtcatagctgtccctcttctcttatggagatccctcgaggagctttttgcaaaagcctaggcctccaaaaaagcctcttcactacttctggaatagctcagaagccgaggcggcctcggcctctgcataaataaaaaaaattagtcagccatggggcggagaatgggcggaactgggcggagttaggggcgggatgggcggagttaggggcgggactatggttgctgactaattgctgcattaatgaatcggccaacgcgcggggagaggcggtttgcgtattgggcgctcttccgcttcctcgctcactgactcgctgcgctcggtcgttcggctgcggcgagcggtatcagctcactcaaaggcggtaatacggttatccacagaatcaggggataacgcaggaaagaacatgtgagcaaaaggccagcaaaaggccaggaaccgtaaaaaggccgcgttgctggcgtttttccataggctccgcccccctgacgagcatcacaaaaatcgacgctcaagtcagaggtggcgaaacccgacaggactataaagataccaggcgtttccccctggaagctccctcgtgcgctctcctgttccgaccctgccgcttaccggatacctgtccgcctttctcccttcgggaagcgtggcgctttctcatagctcacgctgtaggtatctcagttcggtgtaggtcgttcgctccaagctgggctgtgtgcacgaaccccccgttcagcccgaccgctgcgccttatccggtaactatcgtcttgagtccaacccggtaagacacgacttatcgccactggcagcagccactggtaacaggattagcagagcgaggtatgtaggcggtgctacagagttcttgaagtggtggcctaactacggctacactagaagaacagtatttggtatctgcgctctgctgaagccagttaccttcggaaaaagagttggtagctcttgatccggcaaacaaaccaccgctggtagcggtggtttttttgtttgcaagcagcagattacgcgcagaaaaaaaggatctcaagaagatcctttgatcttttctacggggtctgacgctcagtggaacgaaaactcacgttaagggattttggtcatgagattatcaaaaaggatcttcacctagatccttttaaattaaaaatgaagttttaaatcaatctaaagtatatatgagtaaacttggtctgacagttaccaatgcttaatcagtgaggcacctatctcagcgatctgtctatttcgttcatccatagttgcctgactccccgtcgtgtagataactacgatacgggagggcttaccatctggccccagtgctgcaatgataccgcgagacccacgctcaccggctccagatttatcagcaataaaccagccagccggaagggccgagcgcagaagtggtcctgcaactttatccgcctccatccagtctattaattgttgccgggaagctagagtaagtagttcgccagttaatagtttgcgcaacgttgttgccattgctacaggcatcgtggtgtcacgctcgtcgtttggtatggcttcattcagctccggttcccaacgatcaaggcgagttacatgatcccccatgttgtgcaaaaaagcggttagctccttcggtcctccgatagttgtcagaagtaagttggccgcagtgttatcactcatggttatggcagcactgcataattctcttactgtcatgccatccgtaagatgcttttctgtgactggtgagtactcaaccaagtcattctgagaatagtgtatgcggcgaccgagttgctcttgcccggcgtcaatacgggataataccgcgccacatagcagaactttaaaagtgctcatcattggaaaacgttcttcggggcgaaaactctcaaggatcttaccgctgttgagatccagttcgatgtaacccactcgtgcacccaactgatcttcagcatcttttactttcaccagcgtttctgggtgagcaaaaacaggaaggcaaaatgccgcaaaaaagggaataagggcgacacggaaatgttgaatactcatactcttcctttttcaatattattgaagcatttatcagggttattgtctcatgagcggatacatatttgaatgtatttagaaaaataaacaaataggggttccgcgcacatttccccgaaaagtgccacctgacgtctaagaaaccattattatcatgacattaacctataaaaataggcgtatcacgaggccctttcgtctcgcgcgtttcggtgatgacggtgaaaacctctgacacatgcagctcccggagacggtcacagcttgtctgtaagcggatgccgggagcagacaagcccgtcagggcgcgtcagcgggtgttggcgggtgtcggggctggcttaactatgcggcatcagagcagattgtactgagagtgcaccattcgacgctctcccttatgcgactcctgcattaggaagcagcccagtagtaggttgaggccgttgagcaccgccgccgcaaggaatggtctggcttatcgaaattaatacgactcactatagggagacc

SEQ ID NO: 179 - DNA, 6905 bp, synthetic construct
  source 1..6905: mol_type = other DNA
ggaattcgagctcgccccgttacataacttacggtaaatggcccgcctggctgaccgcccaacgacccccgcccattgacgtcaataatgacgtatgttcccatagtaacgccaatagggactttccattgacgtcaatgggtggagtatttacggtaaactgcccacttggcagtacatcaagtgtatcatatgccaagtacgccccctattgacgtcaatgacggtaaatggcccgcctggcattatgcccagtacatgaccttatgggactttcctacttggcagtacatctacgtattagtcatcgctattaccatggtgatgcggttttggcagtacatcaatgggcgtggatagcggtttgactcacggggatttccaagtctccaccccattgacgtcaatgggagtttgttttggcaccaaaatcaacgggactttccaaaatgtcgtaacaactccgccccattgacgcaaatgggcggtaggcgtgtacggtgggaggtctatataagcagagctcgtttagtgaaccgtcagatcgcctggagacgccatccacgctgttttgacctccatagaagacaccgggaccgatccagcctccgggggatcgatccccccgatcctgagaacttcagggtgagtttggggacccttgattgttctttctttttcgctattgtaaaattcatgttatatggagggggcaaagttttcagggtgttgtttagaatgggaagatgtcccttgtatcaccatggaccctcatgataattttgtttctttcactttctactctgttgacaaccattgtctcctcttattttcttttcattttctgtaactttttcgttaaactttagcttgcatttgtaacgaatttttaaattcacttttgtttatttgtcagattgtaagtactttctctaatcacttttttttcaaggcaatcagggtatattatattgtacttcagcacagttttagagaacaattgttataattaaatgataaggtagaatatttctgcatataaattctggctggcgtggaaatattcttattggtagaaacaactacatcctggtcatcatcctgcctttctctttatggttacaatgatatacactgtttgagatgaggataaaatactctgagtccaaaccgggcccctctgctaaccatgttcatgccttcttctttttcctacagctcctgggcaacgtgctggttattgtgctgtctcatcattttggcaaagaattgtaatacgactcactatagggcgaattcggatcccccggtagttaattaatacgcgtcactatgaagtgcctgctgtacctggccttcctgttcatcggcgtgaactgcaaggacatccagatgacccagagccccagcagcctgagcgccagcgtgggcgaccgcgtgaccatcacctgccgcgccagccaggacatccgcaactacctgaactggtaccagcagaagcccggcaaggcccccaagctgctgatctactacaccagccgcctggagagcggcgtgcccagccgcttcagcggcagcggcagcggcaccgactacaccctgaccatcagcagcctgcagcccgaggacttcgccacctactactgccagcagggcaacaccctgccctggaccttcggccagggcaccaaggtggagatcaagggcggcggcggcagcggcggcggcggcagcggcggcggcggcagcgaggtgcagctggtggagagcggcggcggcctggtgcagcccggcggcagcctgcgcctgagctgcgccgccagcggctacagcttcaccggctacaccatgaactgggtgcgccaggcccccggcaagggcctggagtgggtggccctgatcaacccctacaagggcgtgagcacctacaaccagaagttcaaggaccgcttcaccatcagcgtggacaagagcaagaacaccgcctacctgcagatgaacagcctgcgcgccgaggacaccgccgtgtactactgcgcccgcagcggctactacggcgacagcgactggtacttcgacgtgtggggccagggcaccctggtgaccgtgagcagctgccccccctgccccgcccccgagctgctgggcggccccagcgtgttcaagttcacgatcgtttttccacacaaccaaaaaggaaactggaaaaatgttccttctaattaccattattgcccgtcaagctcagatttaaattggcataatgacttaataggcacagccttacaagtcaaaatgccccagagtcacaaggctattcaagcagacggttggatgtgtcatgcttccaaatgggtcactacttgtgatttccgctggtatggaccgaagtatataacacattccatccgatccttcactccatctgtagaacaatgcaaggaaagcattgaacaaacgaaacaaggaacttggctgaatccaggcttccctcctcaaagttgtggatatgcaactgtgacggatgccgaagcagtgattgtccaggtgactcctcaccatgtgctggttgatgaatacacaggagaatgggttgattcacagttcatcaacggaaaatgcagcaattacatatgccccactgtccataactctacaacctggcattctgactataaggtcaaagggctatgtgattctaacctcatttccatggacatcaccttcttctcagaggacggagagctatcatccctgggaaaggagggcacagggttcagaagtaactactttgcttatgaaactggaggcaaggcctgcaaaatgcaatactgcaagcattggggagtcagactcccatcaggtgtctggttcgagatggctgataaggatctctttgctgcagccagattccctgaatgcccagaagggtcaagtatctctgctccatctcagacctcagtggatgtaagtctaattcaggacgttgagaggatcttggattattccctctgccaagaaacctggagcaaaatcagagcgggtcttccaatctctccagtggatctcagctatcttgctcctaaaaacccaggaaccggtcctgctttcaccataatcaatggtaccctaaaatactttgagaccagatacatcagagtcgatattgctgctccaatcctctcaagaatggtcggaatgatctccggaactaccacagaacaggaactgtgggatgactgggcgccatatgaagacgtggaaattggacccaatggagttctgaggaccagttcaggatataagtttcctttatacatgattggacatggtatgttggactccgatcttcatcttagctcaaaggctcaggtgttcgaacatcctcacattcaagacgctgcttcgcaacttcctgatgatgagagtttattttttggtgatactgggctatccaaaaatccaatcgagcttgtagaaggttggttcagtagttggaaaagctctattgcctcttttttctttatcatagggttaatcattggactattcttggttctccgagttggtatccatctttgcattaaattaaagcacaccaagaaaagacagatttatacagacatagagatgaaccgacttggaaagtaactcaaatcctgctaggtatgaaaaaaactaacagatatcacgcctaggactagtgtgaaatagacatcagaattaagaaaaacgtagggtccaagtggttccccgttatggactcgctatctgtcaaccagatcttataccctgaagttcacctagatagcccgatagttaccaataagatagtagccatcctggagtatgctcgactgtttaaacctgcaggcatgcaagctgatctttttccctctgccaaaaattatggggacatcatgaagccccttgagcatctgacttctggctaataaaggaaatttattttcattgcaatagtgtgttggaattttttgtgtctctcactcggaaggacatatgggagggcaaatcatttaaaacatcagaatgagtatttggtttagagtttggcaacatatgcccatatgctggctgccatgaacaaaggttggctataaagaggtcatcagtatatgaaacagccccctgctgtccattccttattccatagaaaagccttgacttgaggttagattttttttatattttgttttgtgttatttttttctttaacatccctaaaattttccttacatgttttactagccagatttttcctcctctcctgactactcccagtcatagctgtccctcttctcttatggagatccctcgaggagctttttgcaaaagcctaggcctccaaaaaagcctcttcactacttctggaatagctcagaagccgaggcggcctcggcctctgcataaataaaaaaaattagtcagccatggggcggagaatgggcggaactgggcggagttaggggcgggatgggcggagttaggggcgggactatggttgctgactaattgctgcattaatgaatcggccaacgcgcggggagaggcggtttgcgtattgggcgctcttccgcttcctcgctcactgactcgctgcgctcggtcgttcggctgcggcgagcggtatcagctcactcaaaggcggtaatacggttatccacagaatcaggggataacgcaggaaagaacatgtgagcaaaaggccagcaaaaggccaggaaccgtaaaaaggccgcgttgctggcgtttttccataggctccgcccccctgacgagcatcacaaaaatcgacgctcaagtcagaggtggcgaaacccgacaggactataaagataccaggcgtttccccctggaagctccctcgtgcgctctcctgttccgaccctgccgcttaccggatacctgtccgcctttctcccttcgggaagcgtggcgctttctcatagctcacgctgtaggtatctcagttcggtgtaggtcgttcgctccaagctgggctgtgtgcacgaaccccccgttcagcccgaccgctgcgccttatccggtaactatcgtcttgagtccaacccggtaagacacgacttatcgccactggcagcagccactggtaacaggattagcagagcgaggtatgtaggcggtgctacagagttcttgaagtggtggcctaactacggctacactagaagaacagtatttggtatctgcgctctgctgaagccagttaccttcggaaaaagagttggtagctcttgatccggcaaacaaaccaccgctggtagcggtggtttttttgtttgcaagcagcagattacgcgcagaaaaaaaggatctcaagaagatcctttgatcttttctacggggtctgacgctcagtggaacgaaaactcacgttaagggattttggtcatgagattatcaaaaaggatcttcacctagatccttttaaattaaaaatgaagttttaaatcaatctaaagtatatatgagtaaacttggtctgacagttaccaatgcttaatcagtgaggcacctatctcagcgatctgtctatttcgttcatccatagttgcctgactccccgtcgtgtagataactacgatacgggagggcttaccatctggccccagtgctgcaatgataccgcgagacccacgctcaccggctccagatttatcagcaataaaccagccagccggaagggccgagcgcagaagtggtcctgcaactttatccgcctccatccagtctattaattgttgccgggaagctagagtaagtagttcgccagttaatagtttgcgcaacgttgttgccattgctacaggcatcgtggtgtcacgctcgtcgtttggtatggcttcattcagctccggttcccaacgatcaaggcgagttacatgatcccccatgttgtgcaaaaaagcggttagctccttcggtcctccgatagttgtcagaagtaagttggccgcagtgttatcactcatggttatggcagcactgcataattctcttactgtcatgccatccgtaagatgcttttctgtgactggtgagtactcaaccaagtcattctgagaatagtgtatgcggcgaccgagttgctcttgcccggcgtcaatacgggataataccgcgccacatagcagaactttaaaagtgctcatcattggaaaacgttcttcggggcgaaaactctcaaggatcttaccgctgttgagatccagttcgatgtaacccactcgtgcacccaactgatcttcagcatcttttactttcaccagcgtttctgggtgagcaaaaacaggaaggcaaaatgccgcaaaaaagggaataagggcgacacggaaatgttgaatactcatactcttcctttttcaatattattgaagcatttatcagggttattgtctcatgagcggatacatatttgaatgtatttagaaaaataaacaaataggggttccgcgcacatttccccgaaaagtgccacctgacgtctaagaaaccattattatcatgacattaacctataaaaataggcgtatcacgaggccctttcgtctcgcgcgtttcggtgatgacggtgaaaacctctgacacatgcagctcccggagacggtcacagcttgtctgtaagcggatgccgggagcagacaagcccgtcagggcgcgtcagcgggtgttggcgggtgtcggggctggcttaactatgcggcatcagagcagattgtactgagagtgcaccattcgacgctctcccttatgcgactcctgcattaggaagcagcccagtagtaggttgaggccgttgagcaccgccgccgcaaggaatggtctggcttatcgaaattaatacgactcactatagggagacc

SEQ ID NO: 180 - DNA, 6896 bp, synthetic construct
  source 1..6896: mol_type = other DNA
ggaattcgagctcgccccgttacataacttacggtaaatggcccgcctggctgaccgcccaacgacccccgcccattgacgtcaataatgacgtatgttcccatagtaacgccaatagggactttccattgacgtcaatgggtggagtatttacggtaaactgcccacttggcagtacatcaagtgtatcatatgccaagtacgccccctattgacgtcaatgacggtaaatggcccgcctggcattatgcccagtacatgaccttatgggactttcctacttggcagtacatctacgtattagtcatcgctattaccatggtgatgcggttttggcagtacatcaatgggcgtggatagcggtttgactcacggggatttccaagtctccaccccattgacgtcaatgggagtttgttttggcaccaaaatcaacgggactttccaaaatgtcgtaacaactccgccccattgacgcaaatgggcggtaggcgtgtacggtgggaggtctatataagcagagctcgtttagtgaaccgtcagatcgcctggagacgccatccacgctgttttgacctccatagaagacaccgggaccgatccagcctccgggggatcgatccccccgatcctgagaacttcagggtgagtttggggacccttgattgttctttctttttcgctattgtaaaattcatgttatatggagggggcaaagttttcagggtgttgtttagaatgggaagatgtcccttgtatcaccatggaccctcatgataattttgtttctttcactttctactctgttgacaaccattgtctcctcttattttcttttcattttctgtaactttttcgttaaactttagcttgcatttgtaacgaatttttaaattcacttttgtttatttgtcagattgtaagtactttctctaatcacttttttttcaaggcaatcagggtatattatattgtacttcagcacagttttagagaacaattgttataattaaatgataaggtagaatatttctgcatataaattctggctggcgtggaaatattcttattggtagaaacaactacatcctggtcatcatcctgcctttctctttatggttacaatgatatacactgtttgagatgaggataaaatactctgagtccaaaccgggcccctctgctaaccatgttcatgccttcttctttttcctacagctcctgggcaacgtgctggttattgtgctgtctcatcattttggcaaagaattgtaatacgactcactatagggcgaattcggatcccccggtagttaattaatacgcgtcactatgaagtgcctgctgtacctggccttcctgttcatcggcgtgaactgcaagcaggtgcagctggtgcagagcggcgccgaggtgaagaagcccggcgccagcgtgaaggtgagctgcaaggccagcggctacaccttcatcagctacaccatgcactgggtgcgccaggcccccggccagggcctggagtggatgggctacatcaacccccgcagcggctacacccactacaaccagaagctgaaggacaaggccaccctgaccgccgacaagagcgccagcaccgcctacatggagctgagcagcctgcgcagcgaggacaccgccgtgtactactgcgcccgcagcgcctactacgactacgacggcttcgcctactggggccagggcaccctggtgaccgtgagcagcggcggcggcggcagcggcggcggcggcagcggcggcggcggcagcgacatccagatgacccagagccccagcagcctgagcgccagcgtgggcgaccgcgtgaccatcacctgcagcgccagcagcagcgtgagctacatgaactggtaccagcagaagcccggcaaggcccccaagcgcctgatctacgacaccagcaagctggccagcggcgtgcccagccgcttcagcggcagcggcagcggcaccgacttcaccctgaccatcagcagcctgcagcccgaggacttcgccacctactactgccagcagtggagcagcaacccccccaccttcggcggcggcaccaaggtggagatcaagtgccccccctgccccgcccccgagctgctgggcggccccagcgtgttcaagttcacgatcgtttttccacacaaccaaaaaggaaactggaaaaatgttccttctaattaccattattgcccgtcaagctcagatttaaattggcataatgacttaataggcacagccttacaagtcaaaatgccccagagtcacaaggctattcaagcagacggttggatgtgtcatgcttccaaatgggtcactacttgtgatttccgctggtatggaccgaagtatataacacattccatccgatccttcactccatctgtagaacaatgcaaggaaagcattgaacaaacgaaacaaggaacttggctgaatccaggcttccctcctcaaagttgtggatatgcaactgtgacggatgccgaagcagtgattgtccaggtgactcctcaccatgtgctggttgatgaatacacaggagaatgggttgattcacagttcatcaacggaaaatgcagcaattacatatgccccactgtccataactctacaacctggcattctgactataaggtcaaagggctatgtgattctaacctcatttccatggacatcaccttcttctcagaggacggagagctatcatccctgggaaaggagggcacagggttcagaagtaactactttgcttatgaaactggaggcaaggcctgcaaaatgcaatactgcaagcattggggagtcagactcccatcaggtgtctggttcgagatggctgataaggatctctttgctgcagccagattccctgaatgcccagaagggtcaagtatctctgctccatctcagacctcagtggatgtaagtctaattcaggacgttgagaggatcttggattattccctctgccaagaaacctggagcaaaatcagagcgggtcttccaatctctccagtggatctcagctatcttgctcctaaaaacccaggaaccggtcctgctttcaccataatcaatggtaccctaaaatactttgagaccagatacatcagagtcgatattgctgctccaatcctctcaagaatggtcggaatgatctccggaactaccacagaacaggaactgtgggatgactgggcgccatatgaagacgtggaaattggacccaatggagttctgaggaccagttcaggatataagtttcctttatacatgattggacatggtatgttggactccgatcttcatcttagctcaaaggctcaggtgttcgaacatcctcacattcaagacgctgcttcgcaacttcctgatgatgagagtttattttttggtgatactgggctatccaaaaatccaatcgagcttgtagaaggttggttcagtagttggaaaagctctattgcctcttttttctttatcatagggttaatcattggactattcttggttctccgagttggtatccatctttgcattaaattaaagcacaccaagaaaagacagatttatacagacatagagatgaaccgacttggaaagtaactcaaatcctgctaggtatgaaaaaaactaacagatatcacgcctaggactagtgtgaaatagacatcagaattaagaaaaacgtagggtccaagtggttccccgttatggactcgctatctgtcaaccagatcttataccctgaagttcacctagatagcccgatagttaccaataagatagtagccatcctggagtatgctcgactgtttaaacctgcaggcatgcaagctgatctttttccctctgccaaaaattatggggacatcatgaagccccttgagcatctgacttctggctaataaaggaaatttattttcattgcaatagtgtgttggaattttttgtgtctctcactcggaaggacatatgggagggcaaatcatttaaaacatcagaatgagtatttggtttagagtttggcaacatatgcccatatgctggctgccatgaacaaaggttggctataaagaggtcatcagtatatgaaacagccccctgctgtccattccttattccatagaaaagccttgacttgaggttagattttttttatattttgttttgtgttatttttttctttaacatccctaaaattttccttacatgttttactagccagatttttcctcctctcctgactactcccagtcatagctgtccctcttctcttatggagatccctcgaggagctttttgcaaaagcctaggcctccaaaaaagcctcttcactacttctggaatagctcagaagccgaggcggcctcggcctctgcataaataaaaaaaattagtcagccatggggcggagaatgggcggaactgggcggagttaggggcgggatgggcggagttaggggcgggactatggttgctgactaattgctgcattaatgaatcggccaacgcgcggggagaggcggtttgcgtattgggcgctcttccgcttcctcgctcactgactcgctgcgctcggtcgttcggctgcggcgagcggtatcagctcactcaaaggcggtaatacggttatccacagaatcaggggataacgcaggaaagaacatgtgagcaaaaggccagcaaaaggccaggaaccgtaaaaaggccgcgttgctggcgtttttccataggctccgcccccctgacgagcatcacaaaaatcgacgctcaagtcagaggtggcgaaacccgacaggactataaagataccaggcgtttccccctggaagctccctcgtgcgctctcctgttccgaccctgccgcttaccggatacctgtccgcctttctcccttcgggaagcgtggcgctttctcatagctcacgctgtaggtatctcagttcggtgtaggtcgttcgctccaagctgggctgtgtgcacgaaccccccgttcagcccgaccgctgcgccttatccggtaactatcgtcttgagtccaacccggtaagacacgacttatcgccactggcagcagccactggtaacaggattagcagagcgaggtatgtaggcggtgctacagagttcttgaagtggtggcctaactacggctacactagaagaacagtatttggtatctgcgctctgctgaagccagttaccttcggaaaaagagttggtagctcttgatccggcaaacaaaccaccgctggtagcggtggtttttttgtttgcaagcagcagattacgcgcagaaaaaaaggatctcaagaagatcctttgatcttttctacggggtctgacgctcagtggaacgaaaactcacgttaagggattttggtcatgagattatcaaaaaggatcttcacctagatccttttaaattaaaaatgaagttttaaatcaatctaaagtatatatgagtaaacttggtctgacagttaccaatgcttaatcagtgaggcacctatctcagcgatctgtctatttcgttcatccatagttgcctgactccccgtcgtgtagataactacgatacgggagggcttaccatctggccccagtgctgcaatgataccgcgagacccacgctcaccggctccagatttatcagcaataaaccagccagccggaagggccgagcgcagaagtggtcctgcaactttatccgcctccatccagtctattaattgttgccgggaagctagagtaagtagttcgccagttaatagtttgcgcaacgttgttgccattgctacaggcatcgtggtgtcacgctcgtcgtttggtatggcttcattcagctccggttcccaacgatcaaggcgagttacatgatcccccatgttgtgcaaaaaagcggttagctccttcggtcctccgatagttgtcagaagtaagttggccgcagtgttatcactcatggttatggcagcactgcataattctcttactgtcatgccatccgtaagatgcttttctgtgactggtgagtactcaaccaagtcattctgagaatagtgtatgcggcgaccgagttgctcttgcccggcgtcaatacgggataataccgcgccacatagcagaactttaaaagtgctcatcattggaaaacgttcttcggggcgaaaactctcaaggatcttaccgctgttgagatccagttcgatgtaacccactcgtgcacccaactgatcttcagcatcttttactttcaccagcgtttctgggtgagcaaaaacaggaaggcaaaatgccgcaaaaaagggaataagggcgacacggaaatgttgaatactcatactcttcctttttcaatattattgaagcatttatcagggttattgtctcatgagcggatacatatttgaatgtatttagaaaaataaacaaataggggttccgcgcacatttccccgaaaagtgccacctgacgtctaagaaaccattattatcatgacattaacctataaaaataggcgtatcacgaggccctttcgtctcgcgcgtttcggtgatgacggtgaaaacctctgacacatgcagctcccggagacggtcacagcttgtctgtaagcggatgccgggagcagacaagcccgtcagggcgcgtcagcgggtgttggcgggtgtcggggctggcttaactatgcggcatcagagcagattgtactgagagtgcaccattcgacgctctcccttatgcgactcctgcattaggaagcagcccagtagtaggttgaggccgttgagcaccgccgccgcaaggaatggtctggcttatcgaaattaatacgactcactatagggagacc

SEQ ID NO: 181 - DNA, 6896 bp, synthetic construct
  source 1..6896: mol_type = other DNA
ggaattcgagctcgccccgttacataacttacggtaaatggcccgcctggctgaccgcccaacgacccccgcccattgacgtcaataatgacgtatgttcccatagtaacgccaatagggactttccattgacgtcaatgggtggagtatttacggtaaactgcccacttggcagtacatcaagtgtatcatatgccaagtacgccccctattgacgtcaatgacggtaaatggcccgcctggcattatgcccagtacatgaccttatgggactttcctacttggcagtacatctacgtattagtcatcgctattaccatggtgatgcggttttggcagtacatcaatgggcgtggatagcggtttgactcacggggatttccaagtctccaccccattgacgtcaatgggagtttgttttggcaccaaaatcaacgggactttccaaaatgtcgtaacaactccgccccattgacgcaaatgggcggtaggcgtgtacggtgggaggtctatataagcagagctcgtttagtgaaccgtcagatcgcctggagacgccatccacgctgttttgacctccatagaagacaccgggaccgatccagcctccgggggatcgatccccccgatcctgagaacttcagggtgagtttggggacccttgattgttctttctttttcgctattgtaaaattcatgttatatggagggggcaaagttttcagggtgttgtttagaatgggaagatgtcccttgtatcaccatggaccctcatgataattttgtttctttcactttctactctgttgacaaccattgtctcctcttattttcttttcattttctgtaactttttcgttaaactttagcttgcatttgtaacgaatttttaaattcacttttgtttatttgtcagattgtaagtactttctctaatcacttttttttcaaggcaatcagggtatattatattgtacttcagcacagttttagagaacaattgttataattaaatgataaggtagaatatttctgcatataaattctggctggcgtggaaatattcttattggtagaaacaactacatcctggtcatcatcctgcctttctctttatggttacaatgatatacactgtttgagatgaggataaaatactctgagtccaaaccgggcccctctgctaaccatgttcatgccttcttctttttcctacagctcctgggcaacgtgctggttattgtgctgtctcatcattttggcaaagaattgtaatacgactcactatagggcgaattcggatcccccggtagttaattaatacgcgtcactatgaagtgcctgctgtacctggccttcctgttcatcggcgtgaactgcaagcaggtgcagctgcagcagagcggcgccgagctggcccgccccggcgccagcgtgaagatgagctgcaaggccagcggctacaccttcacccgctacaccatgcactgggtgaagcagcgccccggccagggcctggagtggatcggctacatcaaccccagccgcggctacaccaactacaaccagaagttcaaggacaaggccaccctgaccaccgacaagagcagcagcaccgcctacatgcagctgagcagcctgaccagcgaggacagcgccgtgtactactgcgcccgctactacgacgaccactactgcctggactactggggccagggcaccaccctgaccgtgagcagcggcggcggcggcagcggcggcggcggcagcggcggcggcggcagccagatcgtgctgacccagagccccgccatcatgagcgccagccccggcgagaaggtgaccatgacctgcagcgccagcagcagcgtgagctacatgaactggtaccagcagaagagcggcaccagccccaagcgctggatctacgacaccagcaagctggccagcggcgtgcccgcccacttccgcggcagcggcagcggcaccagctacagcctgaccatcagcggcatggaggccgaggacgccgccacctactactgccagcagtggagcagcaaccccttcaccttcggcagcggcaccaagctggagatcaaccgctgccccccctgccccgcccccgagctgctgggcggccccagcgtgttcaagttcacgatcgtttttccacacaaccaaaaaggaaactggaaaaatgttccttctaattaccattattgcccgtcaagctcagatttaaattggcataatgacttaataggcacagccttacaagtcaaaatgccccagagtcacaaggctattcaagcagacggttggatgtgtcatgcttccaaatgggtcactacttgtgatttccgctggtatggaccgaagtatataacacattccatccgatccttcactccatctgtagaacaatgcaaggaaagcattgaacaaacgaaacaaggaacttggctgaatccaggcttccctcctcaaagttgtggatatgcaactgtgacggatgccgaagcagtgattgtccaggtgactcctcaccatgtgctggttgatgaatacacaggagaatgggttgattcacagttcatcaacggaaaatgcagcaattacatatgccccactgtccataactctacaacctggcattctgactataaggtcaaagggctatgtgattctaacctcatttccatggacatcaccttcttctcagaggacggagagctatcatccctgggaaaggagggcacagggttcagaagtaactactttgcttatgaaactggaggcaaggcctgcaaaatgcaatactgcaagcattggggagtcagactcccatcaggtgtctggttcgagatggctgataaggatctctttgctgcagccagattccctgaatgcccagaagggtcaagtatctctgctccatctcagacctcagtggatgtaagtctaattcaggacgttgagaggatcttggattattccctctgccaagaaacctggagcaaaatcagagcgggtcttccaatctctccagtggatctcagctatcttgctcctaaaaacccaggaaccggtcctgctttcaccataatcaatggtaccctaaaatactttgagaccagatacatcagagtcgatattgctgctccaatcctctcaagaatggtcggaatgatctccggaactaccacagaacaggaactgtgggatgactgggcgccatatgaagacgtggaaattggacccaatggagttctgaggaccagttcaggatataagtttcctttatacatgattggacatggtatgttggactccgatcttcatcttagctcaaaggctcaggtgttcgaacatcctcacattcaagacgctgcttcgcaacttcctgatgatgagagtttattttttggtgatactgggctatccaaaaatccaatcgagcttgtagaaggttggttcagtagttggaaaagctctattgcctcttttttctttatcatagggttaatcattggactattcttggttctccgagttggtatccatctttgcattaaattaaagcacaccaagaaaagacagatttatacagacatagagatgaaccgacttggaaagtaactcaaatcctgctaggtatgaaaaaaactaacagatatcacgcctaggactagtgtgaaatagacatcagaattaagaaaaacgtagggtccaagtggttccccgttatggactcgctatctgtcaaccagatcttataccctgaagttcacctagatagcccgatagttaccaataagatagtagccatcctggagtatgctcgactgtttaaacctgcaggcatgcaagctgatctttttccctctgccaaaaattatggggacatcatgaagccccttgagcatctgacttctggctaataaaggaaatttattttcattgcaatagtgtgttggaattttttgtgtctctcactcggaaggacatatgggagggcaaatcatttaaaacatcagaatgagtatttggtttagagtttggcaacatatgcccatatgctggctgccatgaacaaaggttggctataaagaggtcatcagtatatgaaacagccccctgctgtccattccttattccatagaaaagccttgacttgaggttagattttttttatattttgttttgtgttatttttttctttaacatccctaaaattttccttacatgttttactagccagatttttcctcctctcctgactactcccagtcatagctgtccctcttctcttatggagatccctcgaggagctttttgcaaaagcctaggcctccaaaaaagcctcttcactacttctggaatagctcagaagccgaggcggcctcggcctctgcataaataaaaaaaattagtcagccatggggcggagaatgggcggaactgggcggagttaggggcgggatgggcggagttaggggcgggactatggttgctgactaattgctgcattaatgaatcggccaacgcgcggggagaggcggtttgcgtattgggcgctcttccgcttcctcgctcactgactcgctgcgctcggtcgttcggctgcggcgagcggtatcagctcactcaaaggcggtaatacggttatccacagaatcaggggataacgcaggaaagaacatgtgagcaaaaggccagcaaaaggccaggaaccgtaaaaaggccgcgttgctggcgtttttccataggctccgcccccctgacgagcatcacaaaaatcgacgctcaagtcagaggtggcgaaacccgacaggactataaagataccaggcgtttccccctggaagctccctcgtgcgctctcctgttccgaccctgccgcttaccggatacctgtccgcctttctcccttcgggaagcgtggcgctttctcatagctcacgctgtaggtatctcagttcggtgtaggtcgttcgctccaagctgggctgtgtgcacgaaccccccgttcagcccgaccgctgcgccttatccggtaactatcgtcttgagtccaacccggtaagacacgacttatcgccactggcagcagccactggtaacaggattagcagagcgaggtatgtaggcggtgctacagagttcttgaagtggtggcctaactacggctacactagaagaacagtatttggtatctgcgctctgctgaagccagttaccttcggaaaaagagttggtagctcttgatccggcaaacaaaccaccgctggtagcggtggtttttttgtttgcaagcagcagattacgcgcagaaaaaaaggatctcaagaagatcctttgatcttttctacggggtctgacgctcagtggaacgaaaactcacgttaagggattttggtcatgagattatcaaaaaggatcttcacctagatccttttaaattaaaaatgaagttttaaatcaatctaaagtatatatgagtaaacttggtctgacagttaccaatgcttaatcagtgaggcacctatctcagcgatctgtctatttcgttcatccatagttgcctgactccccgtcgtgtagataactacgatacgggagggcttaccatctggccccagtgctgcaatgataccgcgagacccacgctcaccggctccagatttatcagcaataaaccagccagccggaagggccgagcgcagaagtggtcctgcaactttatccgcctccatccagtctattaattgttgccgggaagctagagtaagtagttcgccagttaatagtttgcgcaacgttgttgccattgctacaggcatcgtggtgtcacgctcgtcgtttggtatggcttcattcagctccggttcccaacgatcaaggcgagttacatgatcccccatgttgtgcaaaaaagcggttagctccttcggtcctccgatagttgtcagaagtaagttggccgcagtgttatcactcatggttatggcagcactgcataattctcttactgtcatgccatccgtaagatgcttttctgtgactggtgagtactcaaccaagtcattctgagaatagtgtatgcggcgaccgagttgctcttgcccggcgtcaatacgggataataccgcgccacatagcagaactttaaaagtgctcatcattggaaaacgttcttcggggcgaaaactctcaaggatcttaccgctgttgagatccagttcgatgtaacccactcgtgcacccaactgatcttcagcatcttttactttcaccagcgtttctgggtgagcaaaaacaggaaggcaaaatgccgcaaaaaagggaataagggcgacacggaaatgttgaatactcatactcttcctttttcaatattattgaagcatttatcagggttattgtctcatgagcggatacatatttgaatgtatttagaaaaataaacaaataggggttccgcgcacatttccccgaaaagtgccacctgacgtctaagaaaccattattatcatgacattaacctataaaaataggcgtatcacgaggccctttcgtctcgcgcgtttcggtgatgacggtgaaaacctctgacacatgcagctcccggagacggtcacagcttgtctgtaagcggatgccgggagcagacaagcccgtcagggcgcgtcagcgggtgttggcgggtgtcggggctggcttaactatgcggcatcagagcagattgtactgagagtgcaccattcgacgctctcccttatgcgactcctgcattaggaagcagcccagtagtaggttgaggccgttgagcaccgccgccgcaaggaatggtctggcttatcgaaattaatacgactcactatagggagacc

SEQ ID NO: 182 - DNA, 6893 bp, synthetic construct
  source 1..6893: mol_type = other DNA
ggaattcgagctcgccccgttacataacttacggtaaatggcccgcctggctgaccgcccaacgacccccgcccattgacgtcaataatgacgtatgttcccatagtaacgccaatagggactttccattgacgtcaatgggtggagtatttacggtaaactgcccacttggcagtacatcaagtgtatcatatgccaagtacgccccctattgacgtcaatgacggtaaatggcccgcctggcattatgcccagtacatgaccttatgggactttcctacttggcagtacatctacgtattagtcatcgctattaccatggtgatgcggttttggcagtacatcaatgggcgtggatagcggtttgactcacggggatttccaagtctccaccccattgacgtcaatgggagtttgttttggcaccaaaatcaacgggactttccaaaatgtcgtaacaactccgccccattgacgcaaatgggcggtaggcgtgtacggtgggaggtctatataagcagagctcgtttagtgaaccgtcagatcgcctggagacgccatccacgctgttttgacctccatagaagacaccgggaccgatccagcctccgggggatcgatccccccgatcctgagaacttcagggtgagtttggggacccttgattgttctttctttttcgctattgtaaaattcatgttatatggagggggcaaagttttcagggtgttgtttagaatgggaagatgtcccttgtatcaccatggaccctcatgataattttgtttctttcactttctactctgttgacaaccattgtctcctcttattttcttttcattttctgtaactttttcgttaaactttagcttgcatttgtaacgaatttttaaattcacttttgtttatttgtcagattgtaagtactttctctaatcacttttttttcaaggcaatcagggtatattatattgtacttcagcacagttttagagaacaattgttataattaaatgataaggtagaatatttctgcatataaattctggctggcgtggaaatattcttattggtagaaacaactacatcctggtcatcatcctgcctttctctttatggttacaatgatatacactgtttgagatgaggataaaatactctgagtccaaaccgggcccctctgctaaccatgttcatgccttcttctttttcctacagctcctgggcaacgtgctggttattgtgctgtctcatcattttggcaaagaattgtaatacgactcactatagggcgaattcggatcccccggtagttaattaatacgcgtcactatgaagtgcctgctgtacctggccttcctgttcatcggcgtgaactgcaagcaggtgcagctgcagcagagcggcgccgagctggcccgccccggcgccagcgtgaagatgagctgcaagaccagcggctacaccttcacccgctacaccatgcactgggtgaagcagcgccccggccagggcctggagtggatcggctacatcaaccccagccgcggctacaccaactacaaccagaagttcaaggacaaggccaccctgaccaccgacaagagcagcagcaccgcctacatgcagctgagcagcctgaccagcgaggacagcgccgtgtactactgcgcccgctactacgacgaccactacagcctggactactggggccagggcaccaccctgaccgtgagcagcggcggcggcggcagcggcggcggcggcagcggcggcggcggcagccagatcgtgctgacccagagccccagcagcctgagcgccagcctgggcgagaaggtgaccatgacctgccgcgccagcagcagcgtgagctacatgaactggtaccagcagaagcccggcaccagccccaagcgctggatctacgacaccagcaaggtggccagcggcgtgcccgaccgcttcagcggcagcggcagcggcaccagctacagcctgaccatcagcagcatggaggccgaggacgccgccacctactactgccagcagtggagcagcaaccccctgaccttcggcgccggcaccaagctggagctgaagtgccccccctgccccgcccccgagctgctgggcggccccagcgtgttcaagttcacgatcgtttttccacacaaccaaaaaggaaactggaaaaatgttccttctaattaccattattgcccgtcaagctcagatttaaattggcataatgacttaataggcacagccttacaagtcaaaatgccccagagtcacaaggctattcaagcagacggttggatgtgtcatgcttccaaatgggtcactacttgtgatttccgctggtatggaccgaagtatataacacattccatccgatccttcactccatctgtagaacaatgcaaggaaagcattgaacaaacgaaacaaggaacttggctgaatccaggcttccctcctcaaagttgtggatatgcaactgtgacggatgccgaagcagtgattgtccaggtgactcctcaccatgtgctggttgatgaatacacaggagaatgggttgattcacagttcatcaacggaaaatgcagcaattacatatgccccactgtccataactctacaacctggcattctgactataaggtcaaagggctatgtgattctaacctcatttccatggacatcaccttcttctcagaggacggagagctatcatccctgggaaaggagggcacagggttcagaagtaactactttgcttatgaaactggaggcaaggcctgcaaaatgcaatactgcaagcattggggagtcagactcccatcaggtgtctggttcgagatggctgataaggatctctttgctgcagccagattccctgaatgcccagaagggtcaagtatctctgctccatctcagacctcagtggatgtaagtctaattcaggacgttgagaggatcttggattattccctctgccaagaaacctggagcaaaatcagagcgggtcttccaatctctccagtggatctcagctatcttgctcctaaaaacccaggaaccggtcctgctttcaccataatcaatggtaccctaaaatactttgagaccagatacatcagagtcgatattgctgctccaatcctctcaagaatggtcggaatgatctccggaactaccacagaacaggaactgtgggatgactgggcgccatatgaagacgtggaaattggacccaatggagttctgaggaccagttcaggatataagtttcctttatacatgattggacatggtatgttggactccgatcttcatcttagctcaaaggctcaggtgttcgaacatcctcacattcaagacgctgcttcgcaacttcctgatgatgagagtttattttttggtgatactgggctatccaaaaatccaatcgagcttgtagaaggttggttcagtagttggaaaagctctattgcctcttttttctttatcatagggttaatcattggactattcttggttctccgagttggtatccatctttgcattaaattaaagcacaccaagaaaagacagatttatacagacatagagatgaaccgacttggaaagtaactcaaatcctgctaggtatgaaaaaaactaacagatatcacgcctaggactagtgtgaaatagacatcagaattaagaaaaacgtagggtccaagtggttccccgttatggactcgctatctgtcaaccagatcttataccctgaagttcacctagatagcccgatagttaccaataagatagtagccatcctggagtatgctcgactgtttaaacctgcaggcatgcaagctgatctttttccctctgccaaaaattatggggacatcatgaagccccttgagcatctgacttctggctaataaaggaaatttattttcattgcaatagtgtgttggaattttttgtgtctctcactcggaaggacatatgggagggcaaatcatttaaaacatcagaatgagtatttggtttagagtttggcaacatatgcccatatgctggctgccatgaacaaaggttggctataaagaggtcatcagtatatgaaacagccccctgctgtccattccttattccatagaaaagccttgacttgaggttagattttttttatattttgttttgtgttatttttttctttaacatccctaaaattttccttacatgttttactagccagatttttcctcctctcctgactactcccagtcatagctgtccctcttctcttatggagatccctcgaggagctttttgcaaaagcctaggcctccaaaaaagcctcttcactacttctggaatagctcagaagccgaggcggcctcggcctctgcataaataaaaaaaattagtcagccatggggcggagaatgggcggaactgggcggagttaggggcgggatgggcggagttaggggcgggactatggttgctgactaattgctgcattaatgaatcggccaacgcgcggggagaggcggtttgcgtattgggcgctcttccgcttcctcgctcactgactcgctgcgctcggtcgttcggctgcggcgagcggtatcagctcactcaaaggcggtaatacggttatccacagaatcaggggataacgcaggaaagaacatgtgagcaaaaggccagcaaaaggccaggaaccgtaaaaaggccgcgttgctggcgtttttccataggctccgcccccctgacgagcatcacaaaaatcgacgctcaagtcagaggtggcgaaacccgacaggactataaagataccaggcgtttccccctggaagctccctcgtgcgctctcctgttccgaccctgccgcttaccggatacctgtccgcctttctcccttcgggaagcgtggcgctttctcatagctcacgctgtaggtatctcagttcggtgtaggtcgttcgctccaagctgggctgtgtgcacgaaccccccgttcagcccgaccgctgcgccttatccggtaactatcgtcttgagtccaacccggtaagacacgacttatcgccactggcagcagccactggtaacaggattagcagagcgaggtatgtaggcggtgctacagagttcttgaagtggtggcctaactacggctacactagaagaacagtatttggtatctgcgctctgctgaagccagttaccttcggaaaaagagttggtagctcttgatccggcaaacaaaccaccgctggtagcggtggtttttttgtttgcaagcagcagattacgcgcagaaaaaaaggatctcaagaagatcctttgatcttttctacggggtctgacgctcagtggaacgaaaactcacgttaagggattttggtcatgagattatcaaaaaggatcttcacctagatccttttaaattaaaaatgaagttttaaatcaatctaaagtatatatgagtaaacttggtctgacagttaccaatgcttaatcagtgaggcacctatctcagcgatctgtctatttcgttcatccatagttgcctgactccccgtcgtgtagataactacgatacgggagggcttaccatctggccccagtgctgcaatgataccgcgagacccacgctcaccggctccagatttatcagcaataaaccagccagccggaagggccgagcgcagaagtggtcctgcaactttatccgcctccatccagtctattaattgttgccgggaagctagagtaagtagttcgccagttaatagtttgcgcaacgttgttgccattgctacaggcatcgtggtgtcacgctcgtcgtttggtatggcttcattcagctccggttcccaacgatcaaggcgagttacatgatcccccatgttgtgcaaaaaagcggttagctccttcggtcctccgatagttgtcagaagtaagttggccgcagtgttatcactcatggttatggcagcactgcataattctcttactgtcatgccatccgtaagatgcttttctgtgactggtgagtactcaaccaagtcattctgagaatagtgtatgcggcgaccgagttgctcttgcccggcgtcaatacgggataataccgcgccacatagcagaactttaaaagtgctcatcattggaaaacgttcttcggggcgaaaactctcaaggatcttaccgctgttgagatccagttcgatgtaacccactcgtgcacccaactgatcttcagcatcttttactttcaccagcgtttctgggtgagcaaaaacaggaaggcaaaatgccgcaaaaaagggaataagggcgacacggaaatgttgaatactcatactcttcctttttcaatattattgaagcatttatcagggttattgtctcatgagcggatacatatttgaatgtatttagaaaaataaacaaataggggttccgcgcacatttccccgaaaagtgccacctgacgtctaagaaaccattattatcatgacattaacctataaaaataggcgtatcacgaggccctttcgtctcgcgcgtttcggtgatgacggtgaaaacctctgacacatgcagctcccggagacggtcacagcttgtctgtaagcggatgccgggagcagacaagcccgtcagggcgcgtcagcgggtgttggcgggtgtcggggctggcttaactatgcggcatcagagcagattgtactgagagtgcaccattcgacgctctcccttatgcgactcctgcattaggaagcagcccagtagtaggttgaggccgttgagcaccgccgccgcaaggaatggtctggcttatcgaaattaatacgactcactatagggagacc

SEQ ID NO: 183 - DNA, 6893 bp, synthetic construct
  source 1..6893: mol_type = other DNA
ggaattcgagctcgccccgttacataacttacggtaaatggcccgcctggctgaccgcccaacgacccccgcccattgacgtcaataatgacgtatgttcccatagtaacgccaatagggactttccattgacgtcaatgggtggagtatttacggtaaactgcccacttggcagtacatcaagtgtatcatatgccaagtacgccccctattgacgtcaatgacggtaaatggcccgcctggcattatgcccagtacatgaccttatgggactttcctacttggcagtacatctacgtattagtcatcgctattaccatggtgatgcggttttggcagtacatcaatgggcgtggatagcggtttgactcacggggatttccaagtctccaccccattgacgtcaatgggagtttgttttggcaccaaaatcaacgggactttccaaaatgtcgtaacaactccgccccattgacgcaaatgggcggtaggcgtgtacggtgggaggtctatataagcagagctcgtttagtgaaccgtcagatcgcctggagacgccatccacgctgttttgacctccatagaagacaccgggaccgatccagcctccgggggatcgatccccccgatcctgagaacttcagggtgagtttggggacccttgattgttctttctttttcgctattgtaaaattcatgttatatggagggggcaaagttttcagggtgttgtttagaatgggaagatgtcccttgtatcaccatggaccctcatgataattttgtttctttcactttctactctgttgacaaccattgtctcctcttattttcttttcattttctgtaactttttcgttaaactttagcttgcatttgtaacgaatttttaaattcacttttgtttatttgtcagattgtaagtactttctctaatcacttttttttcaaggcaatcagggtatattatattgtacttcagcacagttttagagaacaattgttataattaaatgataaggtagaatatttctgcatataaattctggctggcgtggaaatattcttattggtagaaacaactacatcctggtcatcatcctgcctttctctttatggttacaatgatatacactgtttgagatgaggataaaatactctgagtccaaaccgggcccctctgctaaccatgttcatgccttcttctttttcctacagctcctgggcaacgtgctggttattgtgctgtctcatcattttggcaaagaattgtaatacgactcactatagggcgaattcggatcccccggtagttaattaatacgcgtcactatgaagtgcctgctgtacctggccttcctgttcatcggcgtgaactgcaagcaggtgcagctgcagcagagcggcgccgagctggcccgccccggcgccagcgtgaagatgagctgcaagaccagcggctacaccttcacccgctacaccatgcactgggtgaagcagcgccccggccagggcctggagtggatcggctacatcaaccccagccgcggctacaccaactacaaccagaagttcaaggacaaggccaccctgaccaccgacaagagcagcagcaccgcctacatgcagctgagcagcctgaccagcgaggacagcgccgtgtactactgcgcccgctactacgacgaccactacagcctggactactggggccagggcaccaccctgaccgtgagcagcggcggcggcggcagcggcggcggcggcagcggcggcggcggcagccagatcgtgctgacccagagccccgccatcatgagcgccagccccggcgagaaggtgaccatgacctgccgcgccagcagcagcgtgagctacatgaactggtaccagcagaagagcggcaccagccccaagcgctggatctacgacaccagcaaggtggccagcggcgtgccctaccgcttcagcggcagcggcagcggcaccagctacagcctgaccatcagcagcatggaggccgaggacgccgccacctactactgccagcagtggagcagcaaccccctgaccttcggcgccggcaccaagctggagctgaagtgccccccctgccccgcccccgagctgctgggcggccccagcgtgttcaagttcacgatcgtttttccacacaaccaaaaaggaaactggaaaaatgttccttctaattaccattattgcccgtcaagctcagatttaaattggcataatgacttaataggcacagccttacaagtcaaaatgccccagagtcacaaggctattcaagcagacggttggatgtgtcatgcttccaaatgggtcactacttgtgatttccgctggtatggaccgaagtatataacacattccatccgatccttcactccatctgtagaacaatgcaaggaaagcattgaacaaacgaaacaaggaacttggctgaatccaggcttccctcctcaaagttgtggatatgcaactgtgacggatgccgaagcagtgattgtccaggtgactcctcaccatgtgctggttgatgaatacacaggagaatgggttgattcacagttcatcaacggaaaatgcagcaattacatatgccccactgtccataactctacaacctggcattctgactataaggtcaaagggctatgtgattctaacctcatttccatggacatcaccttcttctcagaggacggagagctatcatccctgggaaaggagggcacagggttcagaagtaactactttgcttatgaaactggaggcaaggcctgcaaaatgcaatactgcaagcattggggagtcagactcccatcaggtgtctggttcgagatggctgataaggatctctttgctgcagccagattccctgaatgcccagaagggtcaagtatctctgctccatctcagacctcagtggatgtaagtctaattcaggacgttgagaggatcttggattattccctctgccaagaaacctggagcaaaatcagagcgggtcttccaatctctccagtggatctcagctatcttgctcctaaaaacccaggaaccggtcctgctttcaccataatcaatggtaccctaaaatactttgagaccagatacatcagagtcgatattgctgctccaatcctctcaagaatggtcggaatgatctccggaactaccacagaacaggaactgtgggatgactgggcgccatatgaagacgtggaaattggacccaatggagttctgaggaccagttcaggatataagtttcctttatacatgattggacatggtatgttggactccgatcttcatcttagctcaaaggctcaggtgttcgaacatcctcacattcaagacgctgcttcgcaacttcctgatgatgagagtttattttttggtgatactgggctatccaaaaatccaatcgagcttgtagaaggttggttcagtagttggaaaagctctattgcctcttttttctttatcatagggttaatcattggactattcttggttctccgagttggtatccatctttgcattaaattaaagcacaccaagaaaagacagatttatacagacatagagatgaaccgacttggaaagtaactcaaatcctgctaggtatgaaaaaaactaacagatatcacgcctaggactagtgtgaaatagacatcagaattaagaaaaacgtagggtccaagtggttccccgttatggactcgctatctgtcaaccagatcttataccctgaagttcacctagatagcccgatagttaccaataagatagtagccatcctggagtatgctcgactgtttaaacctgcaggcatgcaagctgatctttttccctctgccaaaaattatggggacatcatgaagccccttgagcatctgacttctggctaataaaggaaatttattttcattgcaatagtgtgttggaattttttgtgtctctcactcggaaggacatatgggagggcaaatcatttaaaacatcagaatgagtatttggtttagagtttggcaacatatgcccatatgctggctgccatgaacaaaggttggctataaagaggtcatcagtatatgaaacagccccctgctgtccattccttattccatagaaaagccttgacttgaggttagattttttttatattttgttttgtgttatttttttctttaacatccctaaaattttccttacatgttttactagccagatttttcctcctctcctgactactcccagtcatagctgtccctcttctcttatggagatccctcgaggagctttttgcaaaagcctaggcctccaaaaaagcctcttcactacttctggaatagctcagaagccgaggcggcctcggcctctgcataaataaaaaaaattagtcagccatggggcggagaatgggcggaactgggcggagttaggggcgggatgggcggagttaggggcgggactatggttgctgactaattgctgcattaatgaatcggccaacgcgcggggagaggcggtttgcgtattgggcgctcttccgcttcctcgctcactgactcgctgcgctcggtcgttcggctgcggcgagcggtatcagctcactcaaaggcggtaatacggttatccacagaatcaggggataacgcaggaaagaacatgtgagcaaaaggccagcaaaaggccaggaaccgtaaaaaggccgcgttgctggcgtttttccataggctccgcccccctgacgagcatcacaaaaatcgacgctcaagtcagaggtggcgaaacccgacaggactataaagataccaggcgtttccccctggaagctccctcgtgcgctctcctgttccgaccctgccgcttaccggatacctgtccgcctttctcccttcgggaagcgtggcgctttctcatagctcacgctgtaggtatctcagttcggtgtaggtcgttcgctccaagctgggctgtgtgcacgaaccccccgttcagcccgaccgctgcgccttatccggtaactatcgtcttgagtccaacccggtaagacacgacttatcgccactggcagcagccactggtaacaggattagcagagcgaggtatgtaggcggtgctacagagttcttgaagtggtggcctaactacggctacactagaagaacagtatttggtatctgcgctctgctgaagccagttaccttcggaaaaagagttggtagctcttgatccggcaaacaaaccaccgctggtagcggtggtttttttgtttgcaagcagcagattacgcgcagaaaaaaaggatctcaagaagatcctttgatcttttctacggggtctgacgctcagtggaacgaaaactcacgttaagggattttggtcatgagattatcaaaaaggatcttcacctagatccttttaaattaaaaatgaagttttaaatcaatctaaagtatatatgagtaaacttggtctgacagttaccaatgcttaatcagtgaggcacctatctcagcgatctgtctatttcgttcatccatagttgcctgactccccgtcgtgtagataactacgatacgggagggcttaccatctggccccagtgctgcaatgataccgcgagacccacgctcaccggctccagatttatcagcaataaaccagccagccggaagggccgagcgcagaagtggtcctgcaactttatccgcctccatccagtctattaattgttgccgggaagctagagtaagtagttcgccagttaatagtttgcgcaacgttgttgccattgctacaggcatcgtggtgtcacgctcgtcgtttggtatggcttcattcagctccggttcccaacgatcaaggcgagttacatgatcccccatgttgtgcaaaaaagcggttagctccttcggtcctccgatagttgtcagaagtaagttggccgcagtgttatcactcatggttatggcagcactgcataattctcttactgtcatgccatccgtaagatgcttttctgtgactggtgagtactcaaccaagtcattctgagaatagtgtatgcggcgaccgagttgctcttgcccggcgtcaatacgggataataccgcgccacatagcagaactttaaaagtgctcatcattggaaaacgttcttcggggcgaaaactctcaaggatcttaccgctgttgagatccagttcgatgtaacccactcgtgcacccaactgatcttcagcatcttttactttcaccagcgtttctgggtgagcaaaaacaggaaggcaaaatgccgcaaaaaagggaataagggcgacacggaaatgttgaatactcatactcttcctttttcaatattattgaagcatttatcagggttattgtctcatgagcggatacatatttgaatgtatttagaaaaataaacaaataggggttccgcgcacatttccccgaaaagtgccacctgacgtctaagaaaccattattatcatgacattaacctataaaaataggcgtatcacgaggccctttcgtctcgcgcgtttcggtgatgacggtgaaaacctctgacacatgcagctcccggagacggtcacagcttgtctgtaagcggatgccgggagcagacaagcccgtcagggcgcgtcagcgggtgttggcgggtgtcggggctggcttaactatgcggcatcagagcagattgtactgagagtgcaccattcgacgctctcccttatgcgactcctgcattaggaagcagcccagtagtaggttgaggccgttgagcaccgccgccgcaaggaatggtctggcttatcgaaattaatacgactcactatagggagacc

SEQ ID NO: 184 - DNA, 6905 bp, synthetic construct
  source 1..6905: mol_type = other DNA
ggaattcgagctcgccccgttacataacttacggtaaatggcccgcctggctgaccgcccaacgacccccgcccattgacgtcaataatgacgtatgttcccatagtaacgccaatagggactttccattgacgtcaatgggtggagtatttacggtaaactgcccacttggcagtacatcaagtgtatcatatgccaagtacgccccctattgacgtcaatgacggtaaatggcccgcctggcattatgcccagtacatgaccttatgggactttcctacttggcagtacatctacgtattagtcatcgctattaccatggtgatgcggttttggcagtacatcaatgggcgtggatagcggtttgactcacggggatttccaagtctccaccccattgacgtcaatgggagtttgttttggcaccaaaatcaacgggactttccaaaatgtcgtaacaactccgccccattgacgcaaatgggcggtaggcgtgtacggtgggaggtctatataagcagagctcgtttagtgaaccgtcagatcgcctggagacgccatccacgctgttttgacctccatagaagacaccgggaccgatccagcctccgggggatcgatccccccgatcctgagaacttcagggtgagtttggggacccttgattgttctttctttttcgctattgtaaaattcatgttatatggagggggcaaagttttcagggtgttgtttagaatgggaagatgtcccttgtatcaccatggaccctcatgataattttgtttctttcactttctactctgttgacaaccattgtctcctcttattttcttttcattttctgtaactttttcgttaaactttagcttgcatttgtaacgaatttttaaattcacttttgtttatttgtcagattgtaagtactttctctaatcacttttttttcaaggcaatcagggtatattatattgtacttcagcacagttttagagaacaattgttataattaaatgataaggtagaatatttctgcatataaattctggctggcgtggaaatattcttattggtagaaacaactacatcctggtcatcatcctgcctttctctttatggttacaatgatatacactgtttgagatgaggataaaatactctgagtccaaaccgggcccctctgctaaccatgttcatgccttcttctttttcctacagctcctgggcaacgtgctggttattgtgctgtctcatcattttggcaaagaattgtaatacgactcactatagggcgaattcggatcccccggtagttaattaatacgcgtcactatgaagtgcctgctgtacctggccttcctgttcatcggcgtgaactgcaagcaggtgcagctggtgcagagcggcgccgaggtgaagaagcccggcgccagcgtgaaggtgagctgcaaggccagcggctacaccttcatcagctacaccatgcactgggtgcgccaggcccccggccagggcctggagtggatgggctacatcaacccccgcagcggctacacccactacaaccagaagctgaaggacaaggccaccctgaccgccgacaagagcgccagcaccgcctacatggagctgagcagcctgcgcagcgaggacaccgccgtgtactactgcgcccgcagcgcctactacgactacgacggcttcgcctactggggccagggcaccctggtgaccgtgagcagcggcggcggcggcagcggcggcggcggcagcggcggcggcggcagcgacatccagatgacccagagccccagcagcctgagcgccagcgtgggcgaccgcgtgaccatcacctgcagcgccagcagcagcgtgagctacatgaactggtaccagcagaagcccggcaaggcccccaagcgcctgatctacgacaccagcaagctggccagcggcgtgcccagccgcttcagcggcagcggcagcggcaccgacttcaccctgaccatcagcagcctgcagcccgaggacttcgccacctactactgccagcagtggagcagcaacccccccaccttcggcggcggcaccaaggtggagatcaaggcggccgcaagtggtggttctggaggcggtggaagtggtggcggaggtagtgggcccaagttcaccatagtttttccacacaaccaaaaaggaaactggaaaaatgttccttctaattaccattattgcccgtcaagctcagatttaaattggcataatgacttaataggcacagccttacaagtcaaaatgccccagagtcacaaggctattcaagcagacggttggatgtgtcatgcttccaaatgggtcactacttgtgatttccgctggtatggaccgaagtatataacacattccatccgatccttcactccatctgtagaacaatgcaaggaaagcattgaacaaacgaaacaaggaacttggctgaatccaggcttccctcctcaaagttgtggatatgcaactgtgacggatgccgaagcagtgattgtccaggtgactcctcaccatgtgctggttgatgaatacacaggagaatgggttgattcacagttcatcaacggaaaatgcagcaattacatatgccccactgtccataactctacaacctggcattctgactataaggtcaaagggctatgtgattctaacctcatttccatggacatcaccttcttctcagaggacggagagctatcatccctgggaaaggagggcacagggttcagaagtaactactttgcttatgaaactggaggcaaggcctgcaaaatgcaatactgcaagcattggggagtcagactcccatcaggtgtctggttcgagatggctgataaggatctctttgctgcagccagattccctgaatgcccagaagggtcaagtatctctgctccatctcagacctcagtggatgtaagtctaattcaggacgttgagaggatcttggattattccctctgccaagaaacctggagcaaaatcagagcgggtcttccaatctctccagtggatctcagctatcttgctcctaaaaacccaggaaccggtcctgctttcaccataatcaatggtaccctaaaatactttgagaccagatacatcagagtcgatattgctgctccaatcctctcaagaatggtcggaatgatcagtggaactaccacagaacaggaactgtgggatgactgggcaccatatgaagacgtggaaattggacccaatggagttctgaggaccagttcaggatataagtttcctttatacatgattggacatggtatgttggactccgatcttcatcttagctcaaaggctcaggtgttcgaacatcctcacattcaagacgctgcttcgcaacttcctgatgatgagagtttattttttggtgatactgggctatccaaaaatccaatcgagcttgtagaaggttggttcagtagttggaaaagctctattgcctcttttttctttatcatagggttaatcattggactattcttggttctccgagttggtatccatctttgcattaaattaaagcacaccaagaaaagacagatttatacagacatagagatgaaccgacttggaaagtaactcaaatcctgctaggtatgaaaaaaactaacagatatcacgcctaggactagtgtgaaatagacatcagaattaagaaaaacgtagggtccaagtggttccccgttatggactcgctatctgtcaaccagatcttataccctgaagttcacctagatagcccgatagttaccaataagatagtagccatcctggagtatgctcgactgtttaaacctgcaggcatgcaagctgatctttttccctctgccaaaaattatggggacatcatgaagccccttgagcatctgacttctggctaataaaggaaatttattttcattgcaatagtgtgttggaattttttgtgtctctcactcggaaggacatatgggagggcaaatcatttaaaacatcagaatgagtatttggtttagagtttggcaacatatgcccatatgctggctgccatgaacaaaggttggctataaagaggtcatcagtatatgaaacagccccctgctgtccattccttattccatagaaaagccttgacttgaggttagattttttttatattttgttttgtgttatttttttctttaacatccctaaaattttccttacatgttttactagccagatttttcctcctctcctgactactcccagtcatagctgtccctcttctcttatggagatccctcgaggagctttttgcaaaagcccaggcctccaaaaaagcctcttcactacttctggaatagctcagaagccgaggcggcctcggcctctgcataaataaaaaaaattagtcagccatggggcggagaatgggcggaactgggcggagttaggggcgggatgggcggagttaggggcgggactatggttgctgactaattgctgcattaatgaatcggccaacgcgcggggagaggcggtttgcgtattgggcgctcttccgcttcctcgctcactgactcgctgcgctcggtcgttcggctgcggcgagcggtatcagctcactcaaaggcggtaatacggttatccacagaatcaggggataacgcaggaaagaacatgtgagcaaaaggccagcaaaaggccaggaaccgtaaaaaggccgcgttgctggcgtttttccataggctccgcccccctgacgagcatcacaaaaatcgacgctcaagtcagaggtggcgaaacccgacaggactataaagataccaggcgtttccccctggaagctccctcgtgcgctctcctgttccgaccctgccgcttaccggatacctgtccgcctttctcccttcgggaagcgtggcgctttctcatagctcacgctgtaggtatctcagttcggtgtaggtcgttcgctccaagctgggctgtgtgcacgaaccccccgttcagcccgaccgctgcgccttatccggtaactatcgtcttgagtccaacccggtaagacacgacttatcgccactggcagcagccactggtaacaggattagcagagcgaggtatgtaggcggtgctacagagttcttgaagtggtggcctaactacggctacactagaagaacagtatttggtatctgcgctctgctgaagccagttaccttcggaaaaagagttggtagctcttgatccggcaaacaaaccaccgctggtagcggtggtttttttgtttgcaagcagcagattacgcgcagaaaaaaaggatctcaagaagatcctttgatcttttctacggggtctgacgctcagtggaacgaaaactcacgttaagggattttggtcatgagattatcaaaaaggatcttcacctagatccttttaaattaaaaatgaagttttaaatcaatctaaagtatatatgagtaaacttggtctgacagttaccaatgcttaatcagtgaggcacctatctcagcgatctgtctatttcgttcatccatagttgcctgactccccgtcgtgtagataactacgatacgggagggcttaccatctggccccagtgctgcaatgataccgcgagacccacgctcaccggctccagatttatcagcaataaaccagccagccggaagggccgagcgcagaagtggtcctgcaactttatccgcctccatccagtctattaattgttgccgggaagctagagtaagtagttcgccagttaatagtttgcgcaacgttgttgccattgctacaggcatcgtggtgtcacgctcgtcgtttggtatggcttcattcagctccggttcccaacgatcaaggcgagttacatgatcccccatgttgtgcaaaaaagcggttagctccttcggtcctccgatcgttgtcagaagtaagttggccgcagtgttatcactcatggttatggcagcactgcataattctcttactgtcatgccatccgtaagatgcttttctgtgactggtgagtactcaaccaagtcattctgagaatagtgtatgcggcgaccgagttgctcttgcccggcgtcaatacgggataataccgcgccacatagcagaactttaaaagtgctcatcattggaaaacgttcttcggggcgaaaactctcaaggatcttaccgctgttgagatccagttcgatgtaacccactcgtgcacccaactgatcttcagcatcttttactttcaccagcgtttctgggtgagcaaaaacaggaaggcaaaatgccgcaaaaaagggaataagggcgacacggaaatgttgaatactcatactcttcctttttcaatattattgaagcatttatcagggttattgtctcatgagcggatacatatttgaatgtatttagaaaaataaacaaataggggttccgcgcacatttccccgaaaagtgccacctgacgtctaagaaaccattattatcatgacattaacctataaaaataggcgtatcacgaggccctttcgtctcgcgcgtttcggtgatgacggtgaaaacctctgacacatgcagctcccggagacggtcacagcttgtctgtaagcggatgccgggagcagacaagcccgtcagggcgcgtcagcgggtgttggcgggtgtcggggctggcttaactatgcggcatcagagcagattgtactgagagtgcaccattcgacgctctcccttatgcgactcctgcattaggaagcagcccagtagtaggttgaggccgttgagcaccgccgccgcaaggaatggtctggcttatcgaaattaatacgactcactatagggagacc

SEQ ID NO: 185 - DNA, 6905 bp, synthetic construct
  source 1..6905: mol_type = other DNA
ggaattcgagctcgccccgttacataacttacggtaaatggcccgcctggctgaccgcccaacgacccccgcccattgacgtcaataatgacgtatgttcccatagtaacgccaatagggactttccattgacgtcaatgggtggagtatttacggtaaactgcccacttggcagtacatcaagtgtatcatatgccaagtacgccccctattgacgtcaatgacggtaaatggcccgcctggcattatgcccagtacatgaccttatgggactttcctacttggcagtacatctacgtattagtcatcgctattaccatggtgatgcggttttggcagtacatcaatgggcgtggatagcggtttgactcacggggatttccaagtctccaccccattgacgtcaatgggagtttgttttggcaccaaaatcaacgggactttccaaaatgtcgtaacaactccgccccattgacgcaaatgggcggtaggcgtgtacggtgggaggtctatataagcagagctcgtttagtgaaccgtcagatcgcctggagacgccatccacgctgttttgacctccatagaagacaccgggaccgatccagcctccgggggatcgatccccccgatcctgagaacttcagggtgagtttggggacccttgattgttctttctttttcgctattgtaaaattcatgttatatggagggggcaaagttttcagggtgttgtttagaatgggaagatgtcccttgtatcaccatggaccctcatgataattttgtttctttcactttctactctgttgacaaccattgtctcctcttattttcttttcattttctgtaactttttcgttaaactttagcttgcatttgtaacgaatttttaaattcacttttgtttatttgtcagattgtaagtactttctctaatcacttttttttcaaggcaatcagggtatattatattgtacttcagcacagttttagagaacaattgttataattaaatgataaggtagaatatttctgcatataaattctggctggcgtggaaatattcttattggtagaaacaactacatcctggtcatcatcctgcctttctctttatggttacaatgatatacactgtttgagatgaggataaaatactctgagtccaaaccgggcccctctgctaaccatgttcatgccttcttctttttcctacagctcctgggcaacgtgctggttattgtgctgtctcatcattttggcaaagaattgtaatacgactcactatagggcgaattcggatcccccggtagttaattaatacgcgtcactatgaagtgcctgctgtacctggccttcctgttcatcggcgtgaactgcaagcaggtgcagctgcagcagagcggcgccgagctggcccgccccggcgccagcgtgaagatgagctgcaaggccagcggctacaccttcacccgctacaccatgcactgggtgaagcagcgccccggccagggcctggagtggatcggctacatcaaccccagccgcggctacaccaactacaaccagaagttcaaggacaaggccaccctgaccaccgacaagagcagcagcaccgcctacatgcagctgagcagcctgaccagcgaggacagcgccgtgtactactgcgcccgctactacgacgaccactactgcctggactactggggccagggcaccaccctgaccgtgagcagcggcggcggcggcagcggcggcggcggcagcggcggcggcggcagccagatcgtgctgacccagagccccgccatcatgagcgccagccccggcgagaaggtgaccatgacctgcagcgccagcagcagcgtgagctacatgaactggtaccagcagaagagcggcaccagccccaagcgctggatctacgacaccagcaagctggccagcggcgtgcccgcccacttccgcggcagcggcagcggcaccagctacagcctgaccatcagcggcatggaggccgaggacgccgccacctactactgccagcagtggagcagcaaccccttcaccttcggcagcggcaccaagctggagatcaaccgcgcggccgcaagtggtggttctggaggcggtggaagtggtggcggaggtagtgggcccaagttcaccatagtttttccacacaaccaaaaaggaaactggaaaaatgttccttctaattaccattattgcccgtcaagctcagatttaaattggcataatgacttaataggcacagccttacaagtcaaaatgccccagagtcacaaggctattcaagcagacggttggatgtgtcatgcttccaaatgggtcactacttgtgatttccgctggtatggaccgaagtatataacacattccatccgatccttcactccatctgtagaacaatgcaaggaaagcattgaacaaacgaaacaaggaacttggctgaatccaggcttccctcctcaaagttgtggatatgcaactgtgacggatgccgaagcagtgattgtccaggtgactcctcaccatgtgctggttgatgaatacacaggagaatgggttgattcacagttcatcaacggaaaatgcagcaattacatatgccccactgtccataactctacaacctggcattctgactataaggtcaaagggctatgtgattctaacctcatttccatggacatcaccttcttctcagaggacggagagctatcatccctgggaaaggagggcacagggttcagaagtaactactttgcttatgaaactggaggcaaggcctgcaaaatgcaatactgcaagcattggggagtcagactcccatcaggtgtctggttcgagatggctgataaggatctctttgctgcagccagattccctgaatgcccagaagggtcaagtatctctgctccatctcagacctcagtggatgtaagtctaattcaggacgttgagaggatcttggattattccctctgccaagaaacctggagcaaaatcagagcgggtcttccaatctctccagtggatctcagctatcttgctcctaaaaacccaggaaccggtcctgctttcaccataatcaatggtaccctaaaatactttgagaccagatacatcagagtcgatattgctgctccaatcctctcaagaatggtcggaatgatcagtggaactaccacagaacaggaactgtgggatgactgggcaccatatgaagacgtggaaattggacccaatggagttctgaggaccagttcaggatataagtttcctttatacatgattggacatggtatgttggactccgatcttcatcttagctcaaaggctcaggtgttcgaacatcctcacattcaagacgctgcttcgcaacttcctgatgatgagagtttattttttggtgatactgggctatccaaaaatccaatcgagcttgtagaaggttggttcagtagttggaaaagctctattgcctcttttttctttatcatagggttaatcattggactattcttggttctccgagttggtatccatctttgcattaaattaaagcacaccaagaaaagacagatttatacagacatagagatgaaccgacttggaaagtaactcaaatcctgctaggtatgaaaaaaactaacagatatcacgcctaggactagtgtgaaatagacatcagaattaagaaaaacgtagggtccaagtggttccccgttatggactcgctatctgtcaaccagatcttataccctgaagttcacctagatagcccgatagttaccaataagatagtagccatcctggagtatgctcgactgtttaaacctgcaggcatgcaagctgatctttttccctctgccaaaaattatggggacatcatgaagccccttgagcatctgacttctggctaataaaggaaatttattttcattgcaatagtgtgttggaattttttgtgtctctcactcggaaggacatatgggagggcaaatcatttaaaacatcagaatgagtatttggtttagagtttggcaacatatgcccatatgctggctgccatgaacaaaggttggctataaagaggtcatcagtatatgaaacagccccctgctgtccattccttattccatagaaaagccttgacttgaggttagattttttttatattttgttttgtgttatttttttctttaacatccctaaaattttccttacatgttttactagccagatttttcctcctctcctgactactcccagtcatagctgtccctcttctcttatggagatccctcgaggagctttttgcaaaagcccaggcctccaaaaaagcctcttcactacttctggaatagctcagaagccgaggcggcctcggcctctgcataaataaaaaaaattagtcagccatggggcggagaatgggcggaactgggcggagttaggggcgggatgggcggagttaggggcgggactatggttgctgactaattgctgcattaatgaatcggccaacgcgcggggagaggcggtttgcgtattgggcgctcttccgcttcctcgctcactgactcgctgcgctcggtcgttcggctgcggcgagcggtatcagctcactcaaaggcggtaatacggttatccacagaatcaggggataacgcaggaaagaacatgtgagcaaaaggccagcaaaaggccaggaaccgtaaaaaggccgcgttgctggcgtttttccataggctccgcccccctgacgagcatcacaaaaatcgacgctcaagtcagaggtggcgaaacccgacaggactataaagataccaggcgtttccccctggaagctccctcgtgcgctctcctgttccgaccctgccgcttaccggatacctgtccgcctttctcccttcgggaagcgtggcgctttctcatagctcacgctgtaggtatctcagttcggtgtaggtcgttcgctccaagctgggctgtgtgcacgaaccccccgttcagcccgaccgctgcgccttatccggtaactatcgtcttgagtccaacccggtaagacacgacttatcgccactggcagcagccactggtaacaggattagcagagcgaggtatgtaggcggtgctacagagttcttgaagtggtggcctaactacggctacactagaagaacagtatttggtatctgcgctctgctgaagccagttaccttcggaaaaagagttggtagctcttgatccggcaaacaaaccaccgctggtagcggtggtttttttgtttgcaagcagcagattacgcgcagaaaaaaaggatctcaagaagatcctttgatcttttctacggggtctgacgctcagtggaacgaaaactcacgttaagggattttggtcatgagattatcaaaaaggatcttcacctagatccttttaaattaaaaatgaagttttaaatcaatctaaagtatatatgagtaaacttggtctgacagttaccaatgcttaatcagtgaggcacctatctcagcgatctgtctatttcgttcatccatagttgcctgactccccgtcgtgtagataactacgatacgggagggcttaccatctggccccagtgctgcaatgataccgcgagacccacgctcaccggctccagatttatcagcaataaaccagccagccggaagggccgagcgcagaagtggtcctgcaactttatccgcctccatccagtctattaattgttgccgggaagctagagtaagtagttcgccagttaatagtttgcgcaacgttgttgccattgctacaggcatcgtggtgtcacgctcgtcgtttggtatggcttcattcagctccggttcccaacgatcaaggcgagttacatgatcccccatgttgtgcaaaaaagcggttagctccttcggtcctccgatcgttgtcagaagtaagttggccgcagtgttatcactcatggttatggcagcactgcataattctcttactgtcatgccatccgtaagatgcttttctgtgactggtgagtactcaaccaagtcattctgagaatagtgtatgcggcgaccgagttgctcttgcccggcgtcaatacgggataataccgcgccacatagcagaactttaaaagtgctcatcattggaaaacgttcttcggggcgaaaactctcaaggatcttaccgctgttgagatccagttcgatgtaacccactcgtgcacccaactgatcttcagcatcttttactttcaccagcgtttctgggtgagcaaaaacaggaaggcaaaatgccgcaaaaaagggaataagggcgacacggaaatgttgaatactcatactcttcctttttcaatattattgaagcatttatcagggttattgtctcatgagcggatacatatttgaatgtatttagaaaaataaacaaataggggttccgcgcacatttccccgaaaagtgccacctgacgtctaagaaaccattattatcatgacattaacctataaaaataggcgtatcacgaggccctttcgtctcgcgcgtttcggtgatgacggtgaaaacctctgacacatgcagctcccggagacggtcacagcttgtctgtaagcggatgccgggagcagacaagcccgtcagggcgcgtcagcgggtgttggcgggtgtcggggctggcttaactatgcggcatcagagcagattgtactgagagtgcaccattcgacgctctcccttatgcgactcctgcattaggaagcagcccagtagtaggttgaggccgttgagcaccgccgccgcaaggaatggtctggcttatcgaaattaatacgactcactatagggagacc

SEQ ID NO: 186 - DNA, 6902 bp, synthetic construct
  source 1..6902: mol_type = other DNA
ggaattcgagctcgccccgttacataacttacggtaaatggcccgcctggctgaccgcccaacgacccccgcccattgacgtcaataatgacgtatgttcccatagtaacgccaatagggactttccattgacgtcaatgggtggagtatttacggtaaactgcccacttggcagtacatcaagtgtatcatatgccaagtacgccccctattgacgtcaatgacggtaaatggcccgcctggcattatgcccagtacatgaccttatgggactttcctacttggcagtacatctacgtattagtcatcgctattaccatggtgatgcggttttggcagtacatcaatgggcgtggatagcggtttgactcacggggatttccaagtctccaccccattgacgtcaatgggagtttgttttggcaccaaaatcaacgggactttccaaaatgtcgtaacaactccgccccattgacgcaaatgggcggtaggcgtgtacggtgggaggtctatataagcagagctcgtttagtgaaccgtcagatcgcctggagacgccatccacgctgttttgacctccatagaagacaccgggaccgatccagcctccgggggatcgatccccccgatcctgagaacttcagggtgagtttggggacccttgattgttctttctttttcgctattgtaaaattcatgttatatggagggggcaaagttttcagggtgttgtttagaatgggaagatgtcccttgtatcaccatggaccctcatgataattttgtttctttcactttctactctgttgacaaccattgtctcctcttattttcttttcattttctgtaactttttcgttaaactttagcttgcatttgtaacgaatttttaaattcacttttgtttatttgtcagattgtaagtactttctctaatcacttttttttcaaggcaatcagggtatattatattgtacttcagcacagttttagagaacaattgttataattaaatgataaggtagaatatttctgcatataaattctggctggcgtggaaatattcttattggtagaaacaactacatcctggtcatcatcctgcctttctctttatggttacaatgatatacactgtttgagatgaggataaaatactctgagtccaaaccgggcccctctgctaaccatgttcatgccttcttctttttcctacagctcctgggcaacgtgctggttattgtgctgtctcatcattttggcaaagaattgtaatacgactcactatagggcgaattcggatcccccggtagttaattaatacgcgtcactatgaagtgcctgctgtacctggccttcctgttcatcggcgtgaactgcaagcaggtgcagctgcagcagagcggcgccgagctggcccgccccggcgccagcgtgaagatgagctgcaagaccagcggctacaccttcacccgctacaccatgcactgggtgaagcagcgccccggccagggcctggagtggatcggctacatcaaccccagccgcggctacaccaactacaaccagaagttcaaggacaaggccaccctgaccaccgacaagagcagcagcaccgcctacatgcagctgagcagcctgaccagcgaggacagcgccgtgtactactgcgcccgctactacgacgaccactacagcctggactactggggccagggcaccaccctgaccgtgagcagcggcggcggcggcagcggcggcggcggcagcggcggcggcggcagccagatcgtgctgacccagagccccgccatcatgagcgccagccccggcgagaaggtgaccatgacctgccgcgccagcagcagcgtgagctacatgaactggtaccagcagaagagcggcaccagccccaagcgctggatctacgacaccagcaaggtggccagcggcgtgccctaccgcttcagcggcagcggcagcggcaccagctacagcctgaccatcagcagcatggaggccgaggacgccgccacctactactgccagcagtggagcagcaaccccctgaccttcggcgccggcaccaagctggagctgaaggcggccgcaagtggtggttctggaggcggtggaagtggtggcggaggtagtgggcccaagttcaccatagtttttccacacaaccaaaaaggaaactggaaaaatgttccttctaattaccattattgcccgtcaagctcagatttaaattggcataatgacttaataggcacagccttacaagtcaaaatgccccagagtcacaaggctattcaagcagacggttggatgtgtcatgcttccaaatgggtcactacttgtgatttccgctggtatggaccgaagtatataacacattccatccgatccttcactccatctgtagaacaatgcaaggaaagcattgaacaaacgaaacaaggaacttggctgaatccaggcttccctcctcaaagttgtggatatgcaactgtgacggatgccgaagcagtgattgtccaggtgactcctcaccatgtgctggttgatgaatacacaggagaatgggttgattcacagttcatcaacggaaaatgcagcaattacatatgccccactgtccataactctacaacctggcattctgactataaggtcaaagggctatgtgattctaacctcatttccatggacatcaccttcttctcagaggacggagagctatcatccctgggaaaggagggcacagggttcagaagtaactactttgcttatgaaactggaggcaaggcctgcaaaatgcaatactgcaagcattggggagtcagactcccatcaggtgtctggttcgagatggctgataaggatctctttgctgcagccagattccctgaatgcccagaagggtcaagtatctctgctccatctcagacctcagtggatgtaagtctaattcaggacgttgagaggatcttggattattccctctgccaagaaacctggagcaaaatcagagcgggtcttccaatctctccagtggatctcagctatcttgctcctaaaaacccaggaaccggtcctgctttcaccataatcaatggtaccctaaaatactttgagaccagatacatcagagtcgatattgctgctccaatcctctcaagaatggtcggaatgatcagtggaactaccacagaacaggaactgtgggatgactgggcaccatatgaagacgtggaaattggacccaatggagttctgaggaccagttcaggatataagtttcctttatacatgattggacatggtatgttggactccgatcttcatcttagctcaaaggctcaggtgttcgaacatcctcacattcaagacgctgcttcgcaacttcctgatgatgagagtttattttttggtgatactgggctatccaaaaatccaatcgagcttgtagaaggttggttcagtagttggaaaagctctattgcctcttttttctttatcatagggttaatcattggactattcttggttctccgagttggtatccatctttgcattaaattaaagcacaccaagaaaagacagatttatacagacatagagatgaaccgacttggaaagtaactcaaatcctgctaggtatgaaaaaaactaacagatatcacgcctaggactagtgtgaaatagacatcagaattaagaaaaacgtagggtccaagtggttccccgttatggactcgctatctgtcaaccagatcttataccctgaagttcacctagatagcccgatagttaccaataagatagtagccatcctggagtatgctcgactgtttaaacctgcaggcatgcaagctgatctttttccctctgccaaaaattatggggacatcatgaagccccttgagcatctgacttctggctaataaaggaaatttattttcattgcaatagtgtgttggaattttttgtgtctctcactcggaaggacatatgggagggcaaatcatttaaaacatcagaatgagtatttggtttagagtttggcaacatatgcccatatgctggctgccatgaacaaaggttggctataaagaggtcatcagtatatgaaacagccccctgctgtccattccttattccatagaaaagccttgacttgaggttagattttttttatattttgttttgtgttatttttttctttaacatccctaaaattttccttacatgttttactagccagatttttcctcctctcctgactactcccagtcatagctgtccctcttctcttatggagatccctcgaggagctttttgcaaaagcccaggcctccaaaaaagcctcttcactacttctggaatagctcagaagccgaggcggcctcggcctctgcataaataaaaaaaattagtcagccatggggcggagaatgggcggaactgggcggagttaggggcgggatgggcggagttaggggcgggactatggttgctgactaattgctgcattaatgaatcggccaacgcgcggggagaggcggtttgcgtattgggcgctcttccgcttcctcgctcactgactcgctgcgctcggtcgttcggctgcggcgagcggtatcagctcactcaaaggcggtaatacggttatccacagaatcaggggataacgcaggaaagaacatgtgagcaaaaggccagcaaaaggccaggaaccgtaaaaaggccgcgttgctggcgtttttccataggctccgcccccctgacgagcatcacaaaaatcgacgctcaagtcagaggtggcgaaacccgacaggactataaagataccaggcgtttccccctggaagctccctcgtgcgctctcctgttccgaccctgccgcttaccggatacctgtccgcctttctcccttcgggaagcgtggcgctttctcatagctcacgctgtaggtatctcagttcggtgtaggtcgttcgctccaagctgggctgtgtgcacgaaccccccgttcagcccgaccgctgcgccttatccggtaactatcgtcttgagtccaacccggtaagacacgacttatcgccactggcagcagccactggtaacaggattagcagagcgaggtatgtaggcggtgctacagagttcttgaagtggtggcctaactacggctacactagaagaacagtatttggtatctgcgctctgctgaagccagttaccttcggaaaaagagttggtagctcttgatccggcaaacaaaccaccgctggtagcggtggtttttttgtttgcaagcagcagattacgcgcagaaaaaaaggatctcaagaagatcctttgatcttttctacggggtctgacgctcagtggaacgaaaactcacgttaagggattttggtcatgagattatcaaaaaggatcttcacctagatccttttaaattaaaaatgaagttttaaatcaatctaaagtatatatgagtaaacttggtctgacagttaccaatgcttaatcagtgaggcacctatctcagcgatctgtctatttcgttcatccatagttgcctgactccccgtcgtgtagataactacgatacgggagggcttaccatctggccccagtgctgcaatgataccgcgagacccacgctcaccggctccagatttatcagcaataaaccagccagccggaagggccgagcgcagaagtggtcctgcaactttatccgcctccatccagtctattaattgttgccgggaagctagagtaagtagttcgccagttaatagtttgcgcaacgttgttgccattgctacaggcatcgtggtgtcacgctcgtcgtttggtatggcttcattcagctccggttcccaacgatcaaggcgagttacatgatcccccatgttgtgcaaaaaagcggttagctccttcggtcctccgatcgttgtcagaagtaagttggccgcagtgttatcactcatggttatggcagcactgcataattctcttactgtcatgccatccgtaagatgcttttctgtgactggtgagtactcaaccaagtcattctgagaatagtgtatgcggcgaccgagttgctcttgcccggcgtcaatacgggataataccgcgccacatagcagaactttaaaagtgctcatcattggaaaacgttcttcggggcgaaaactctcaaggatcttaccgctgttgagatccagttcgatgtaacccactcgtgcacccaactgatcttcagcatcttttactttcaccagcgtttctgggtgagcaaaaacaggaaggcaaaatgccgcaaaaaagggaataagggcgacacggaaatgttgaatactcatactcttcctttttcaatattattgaagcatttatcagggttattgtctcatgagcggatacatatttgaatgtatttagaaaaataaacaaataggggttccgcgcacatttccccgaaaagtgccacctgacgtctaagaaaccattattatcatgacattaacctataaaaataggcgtatcacgaggccctttcgtctcgcgcgtttcggtgatgacggtgaaaacctctgacacatgcagctcccggagacggtcacagcttgtctgtaagcggatgccgggagcagacaagcccgtcagggcgcgtcagcgggtgttggcgggtgtcggggctggcttaactatgcggcatcagagcagattgtactgagagtgcaccattcgacgctctcccttatgcgactcctgcattaggaagcagcccagtagtaggttgaggccgttgagcaccgccgccgcaaggaatggtctggcttatcgaaattaatacgactcactatagggagacc

SEQ ID NO: 187 - DNA, 6902 bp, synthetic construct
  source 1..6902: mol_type = other DNA
ggaattcgagctcgccccgttacataacttacggtaaatggcccgcctggctgaccgcccaacgacccccgcccattgacgtcaataatgacgtatgttcccatagtaacgccaatagggactttccattgacgtcaatgggtggagtatttacggtaaactgcccacttggcagtacatcaagtgtatcatatgccaagtacgccccctattgacgtcaatgacggtaaatggcccgcctggcattatgcccagtacatgaccttatgggactttcctacttggcagtacatctacgtattagtcatcgctattaccatggtgatgcggttttggcagtacatcaatgggcgtggatagcggtttgactcacggggatttccaagtctccaccccattgacgtcaatgggagtttgttttggcaccaaaatcaacgggactttccaaaatgtcgtaacaactccgccccattgacgcaaatgggcggtaggcgtgtacggtgggaggtctatataagcagagctcgtttagtgaaccgtcagatcgcctggagacgccatccacgctgttttgacctccatagaagacaccgggaccgatccagcctccgggggatcgatccccccgatcctgagaacttcagggtgagtttggggacccttgattgttctttctttttcgctattgtaaaattcatgttatatggagggggcaaagttttcagggtgttgtttagaatgggaagatgtcccttgtatcaccatggaccctcatgataattttgtttctttcactttctactctgttgacaaccattgtctcctcttattttcttttcattttctgtaactttttcgttaaactttagcttgcatttgtaacgaatttttaaattcacttttgtttatttgtcagattgtaagtactttctctaatcacttttttttcaaggcaatcagggtatattatattgtacttcagcacagttttagagaacaattgttataattaaatgataaggtagaatatttctgcatataaattctggctggcgtggaaatattcttattggtagaaacaactacatcctggtcatcatcctgcctttctctttatggttacaatgatatacactgtttgagatgaggataaaatactctgagtccaaaccgggcccctctgctaaccatgttcatgccttcttctttttcctacagctcctgggcaacgtgctggttattgtgctgtctcatcattttggcaaagaattgtaatacgactcactatagggcgaattcggatcccccggtagttaattaatacgcgtcactatgaagtgcctgctgtacctggccttcctgttcatcggcgtgaactgcaagcaggtgcagctgcagcagagcggcgccgagctggcccgccccggcgccagcgtgaagatgagctgcaagaccagcggctacaccttcacccgctacaccatgcactgggtgaagcagcgccccggccagggcctggagtggatcggctacatcaaccccagccgcggctacaccaactacaaccagaagttcaaggacaaggccaccctgaccaccgacaagagcagcagcaccgcctacatgcagctgagcagcctgaccagcgaggacagcgccgtgtactactgcgcccgctactacgacgaccactacagcctggactactggggccagggcaccaccctgaccgtgagcagcggcggcggcggcagcggcggcggcggcagcggcggcggcggcagccagatcgtgctgacccagagccccagcagcctgagcgccagcctgggcgagaaggtgaccatgacctgccgcgccagcagcagcgtgagctacatgaactggtaccagcagaagcccggcaccagccccaagcgctggatctacgacaccagcaaggtggccagcggcgtgcccgaccgcttcagcggcagcggcagcggcaccagctacagcctgaccatcagcagcatggaggccgaggacgccgccacctactactgccagcagtggagcagcaaccccctgaccttcggcgccggcaccaagctggagctgaaggcggccgcaagtggtggttctggaggcggtggaagtggtggcggaggtagtgggcccaagttcaccatagtttttccacacaaccaaaaaggaaactggaaaaatgttccttctaattaccattattgcccgtcaagctcagatttaaattggcataatgacttaataggcacagccttacaagtcaaaatgccccagagtcacaaggctattcaagcagacggttggatgtgtcatgcttccaaatgggtcactacttgtgatttccgctggtatggaccgaagtatataacacattccatccgatccttcactccatctgtagaacaatgcaaggaaagcattgaacaaacgaaacaaggaacttggctgaatccaggcttccctcctcaaagttgtggatatgcaactgtgacggatgccgaagcagtgattgtccaggtgactcctcaccatgtgctggttgatgaatacacaggagaatgggttgattcacagttcatcaacggaaaatgcagcaattacatatgccccactgtccataactctacaacctggcattctgactataaggtcaaagggctatgtgattctaacctcatttccatggacatcaccttcttctcagaggacggagagctatcatccctgggaaaggagggcacagggttcagaagtaactactttgcttatgaaactggaggcaaggcctgcaaaatgcaatactgcaagcattggggagtcagactcccatcaggtgtctggttcgagatggctgataaggatctctttgctgcagccagattccctgaatgcccagaagggtcaagtatctctgctccatctcagacctcagtggatgtaagtctaattcaggacgttgagaggatcttggattattccctctgccaagaaacctggagcaaaatcagagcgggtcttccaatctctccagtggatctcagctatcttgctcctaaaaacccaggaaccggtcctgctttcaccataatcaatggtaccctaaaatactttgagaccagatacatcagagtcgatattgctgctccaatcctctcaagaatggtcggaatgatcagtggaactaccacagaacaggaactgtgggatgactgggcaccatatgaagacgtggaaattggacccaatggagttctgaggaccagttcaggatataagtttcctttatacatgattggacatggtatgttggactccgatcttcatcttagctcaaaggctcaggtgttcgaacatcctcacattcaagacgctgcttcgcaacttcctgatgatgagagtttattttttggtgatactgggctatccaaaaatccaatcgagcttgtagaaggttggttcagtagttggaaaagctctattgcctcttttttctttatcatagggttaatcattggactattcttggttctccgagttggtatccatctttgcattaaattaaagcacaccaagaaaagacagatttatacagacatagagatgaaccgacttggaaagtaactcaaatcctgctaggtatgaaaaaaactaacagatatcacgcctaggactagtgtgaaatagacatcagaattaagaaaaacgtagggtccaagtggttccccgttatggactcgctatctgtcaaccagatcttataccctgaagttcacctagatagcccgatagttaccaataagatagtagccatcctggagtatgctcgactgtttaaacctgcaggcatgcaagctgatctttttccctctgccaaaaattatggggacatcatgaagccccttgagcatctgacttctggctaataaaggaaatttattttcattgcaatagtgtgttggaattttttgtgtctctcactcggaaggacatatgggagggcaaatcatttaaaacatcagaatgagtatttggtttagagtttggcaacatatgcccatatgctggctgccatgaacaaaggttggctataaagaggtcatcagtatatgaaacagccccctgctgtccattccttattccatagaaaagccttgacttgaggttagattttttttatattttgttttgtgttatttttttctttaacatccctaaaattttccttacatgttttactagccagatttttcctcctctcctgactactcccagtcatagctgtccctcttctcttatggagatccctcgaggagctttttgcaaaagcccaggcctccaaaaaagcctcttcactacttctggaatagctcagaagccgaggcggcctcggcctctgcataaataaaaaaaattagtcagccatggggcggagaatgggcggaactgggcggagttaggggcgggatgggcggagttaggggcgggactatggttgctgactaattgctgcattaatgaatcggccaacgcgcggggagaggcggtttgcgtattgggcgctcttccgcttcctcgctcactgactcgctgcgctcggtcgttcggctgcggcgagcggtatcagctcactcaaaggcggtaatacggttatccacagaatcaggggataacgcaggaaagaacatgtgagcaaaaggccagcaaaaggccaggaaccgtaaaaaggccgcgttgctggcgtttttccataggctccgcccccctgacgagcatcacaaaaatcgacgctcaagtcagaggtggcgaaacccgacaggactataaagataccaggcgtttccccctggaagctccctcgtgcgctctcctgttccgaccctgccgcttaccggatacctgtccgcctttctcccttcgggaagcgtggcgctttctcatagctcacgctgtaggtatctcagttcggtgtaggtcgttcgctccaagctgggctgtgtgcacgaaccccccgttcagcccgaccgctgcgccttatccggtaactatcgtcttgagtccaacccggtaagacacgacttatcgccactggcagcagccactggtaacaggattagcagagcgaggtatgtaggcggtgctacagagttcttgaagtggtggcctaactacggctacactagaagaacagtatttggtatctgcgctctgctgaagccagttaccttcggaaaaagagttggtagctcttgatccggcaaacaaaccaccgctggtagcggtggtttttttgtttgcaagcagcagattacgcgcagaaaaaaaggatctcaagaagatcctttgatcttttctacggggtctgacgctcagtggaacgaaaactcacgttaagggattttggtcatgagattatcaaaaaggatcttcacctagatccttttaaattaaaaatgaagttttaaatcaatctaaagtatatatgagtaaacttggtctgacagttaccaatgcttaatcagtgaggcacctatctcagcgatctgtctatttcgttcatccatagttgcctgactccccgtcgtgtagataactacgatacgggagggcttaccatctggccccagtgctgcaatgataccgcgagacccacgctcaccggctccagatttatcagcaataaaccagccagccggaagggccgagcgcagaagtggtcctgcaactttatccgcctccatccagtctattaattgttgccgggaagctagagtaagtagttcgccagttaatagtttgcgcaacgttgttgccattgctacaggcatcgtggtgtcacgctcgtcgtttggtatggcttcattcagctccggttcccaacgatcaaggcgagttacatgatcccccatgttgtgcaaaaaagcggttagctccttcggtcctccgatcgttgtcagaagtaagttggccgcagtgttatcactcatggttatggcagcactgcataattctcttactgtcatgccatccgtaagatgcttttctgtgactggtgagtactcaaccaagtcattctgagaatagtgtatgcggcgaccgagttgctcttgcccggcgtcaatacgggataataccgcgccacatagcagaactttaaaagtgctcatcattggaaaacgttcttcggggcgaaaactctcaaggatcttaccgctgttgagatccagttcgatgtaacccactcgtgcacccaactgatcttcagcatcttttactttcaccagcgtttctgggtgagcaaaaacaggaaggcaaaatgccgcaaaaaagggaataagggcgacacggaaatgttgaatactcatactcttcctttttcaatattattgaagcatttatcagggttattgtctcatgagcggatacatatttgaatgtatttagaaaaataaacaaataggggttccgcgcacatttccccgaaaagtgccacctgacgtctaagaaaccattattatcatgacattaacctataaaaataggcgtatcacgaggccctttcgtctcgcgcgtttcggtgatgacggtgaaaacctctgacacatgcagctcccggagacggtcacagcttgtctgtaagcggatgccgggagcagacaagcccgtcagggcgcgtcagcgggtgttggcgggtgtcggggctggcttaactatgcggcatcagagcagattgtactgagagtgcaccattcgacgctctcccttatgcgactcctgcattaggaagcagcccagtagtaggttgaggccgttgagcaccgccgccgcaaggaatggtctggcttatcgaaattaatacgactcactatagggagacc

SEQ ID NO: 188 - DNA, 6914 bp, synthetic construct
  source 1..6914: mol_type = other DNA
ggaattcgagctcgccccgttacataacttacggtaaatggcccgcctggctgaccgcccaacgacccccgcccattgacgtcaataatgacgtatgttcccatagtaacgccaatagggactttccattgacgtcaatgggtggagtatttacggtaaactgcccacttggcagtacatcaagtgtatcatatgccaagtacgccccctattgacgtcaatgacggtaaatggcccgcctggcattatgcccagtacatgaccttatgggactttcctacttggcagtacatctacgtattagtcatcgctattaccatggtgatgcggttttggcagtacatcaatgggcgtggatagcggtttgactcacggggatttccaagtctccaccccattgacgtcaatgggagtttgttttggcaccaaaatcaacgggactttccaaaatgtcgtaacaactccgccccattgacgcaaatgggcggtaggcgtgtacggtgggaggtctatataagcagagctcgtttagtgaaccgtcagatcgcctggagacgccatccacgctgttttgacctccatagaagacaccgggaccgatccagcctccgggggatcgatccccccgatcctgagaacttcagggtgagtttggggacccttgattgttctttctttttcgctattgtaaaattcatgttatatggagggggcaaagttttcagggtgttgtttagaatgggaagatgtcccttgtatcaccatggaccctcatgataattttgtttctttcactttctactctgttgacaaccattgtctcctcttattttcttttcattttctgtaactttttcgttaaactttagcttgcatttgtaacgaatttttaaattcacttttgtttatttgtcagattgtaagtactttctctaatcacttttttttcaaggcaatcagggtatattatattgtacttcagcacagttttagagaacaattgttataattaaatgataaggtagaatatttctgcatataaattctggctggcgtggaaatattcttattggtagaaacaactacatcctggtcatcatcctgcctttctctttatggttacaatgatatacactgtttgagatgaggataaaatactctgagtccaaaccgggcccctctgctaaccatgttcatgccttcttctttttcctacagctcctgggcaacgtgctggttattgtgctgtctcatcattttggcaaagaattgtaatacgactcactatagggcgaattcggatcccccggtagttaattaatacgcgtcactatgaagtgcctgctgtacctggccttcctgttcatcggcgtgaactgcaaggacatccagatgacccagagccccagcagcctgagcgccagcgtgggcgaccgcgtgaccatcacctgccgcgccagccaggacatccgcaactacctgaactggtaccagcagaagcccggcaaggcccccaagctgctgatctactacaccagccgcctggagagcggcgtgcccagccgcttcagcggcagcggcagcggcaccgactacaccctgaccatcagcagcctgcagcccgaggacttcgccacctactactgccagcagggcaacaccctgccctggaccttcggccagggcaccaaggtggagatcaagggcggcggcggcagcggcggcggcggcagcggcggcggcggcagcgaggtgcagctggtggagagcggcggcggcctggtgcagcccggcggcagcctgcgcctgagctgcgccgccagcggctacagcttcaccggctacaccatgaactgggtgcgccaggcccccggcaagggcctggagtgggtggccctgatcaacccctacaagggcgtgagcacctacaaccagaagttcaaggaccgcttcaccatcagcgtggacaagagcaagaacaccgcctacctgcagatgaacagcctgcgcgccgaggacaccgccgtgtactactgcgcccgcagcggctactacggcgacagcgactggtacttcgacgtgtggggccagggcaccctggtgaccgtgagcagcgcggccgcaagtggtggttctggaggcggtggaagtggtggcggaggtagtgggcccaagttcaccatagtttttccacacaaccaaaaaggaaactggaaaaatgttccttctaattaccattattgcccgtcaagctcagatttaaattggcataatgacttaataggcacagccttacaagtcaaaatgccccagagtcacaaggctattcaagcagacggttggatgtgtcatgcttccaaatgggtcactacttgtgatttccgctggtatggaccgaagtatataacacattccatccgatccttcactccatctgtagaacaatgcaaggaaagcattgaacaaacgaaacaaggaacttggctgaatccaggcttccctcctcaaagttgtggatatgcaactgtgacggatgccgaagcagtgattgtccaggtgactcctcaccatgtgctggttgatgaatacacaggagaatgggttgattcacagttcatcaacggaaaatgcagcaattacatatgccccactgtccataactctacaacctggcattctgactataaggtcaaagggctatgtgattctaacctcatttccatggacatcaccttcttctcagaggacggagagctatcatccctgggaaaggagggcacagggttcagaagtaactactttgcttatgaaactggaggcaaggcctgcaaaatgcaatactgcaagcattggggagtcagactcccatcaggtgtctggttcgagatggctgataaggatctctttgctgcagccagattccctgaatgcccagaagggtcaagtatctctgctccatctcagacctcagtggatgtaagtctaattcaggacgttgagaggatcttggattattccctctgccaagaaacctggagcaaaatcagagcgggtcttccaatctctccagtggatctcagctatcttgctcctaaaaacccaggaaccggtcctgctttcaccataatcaatggtaccctaaaatactttgagaccagatacatcagagtcgatattgctgctccaatcctctcaagaatggtcggaatgatcagtggaactaccacagaacaggaactgtgggatgactgggcaccatatgaagacgtggaaattggacccaatggagttctgaggaccagttcaggatataagtttcctttatacatgattggacatggtatgttggactccgatcttcatcttagctcaaaggctcaggtgttcgaacatcctcacattcaagacgctgcttcgcaacttcctgatgatgagagtttattttttggtgatactgggctatccaaaaatccaatcgagcttgtagaaggttggttcagtagttggaaaagctctattgcctcttttttctttatcatagggttaatcattggactattcttggttctccgagttggtatccatctttgcattaaattaaagcacaccaagaaaagacagatttatacagacatagagatgaaccgacttggaaagtaactcaaatcctgctaggtatgaaaaaaactaacagatatcacgcctaggactagtgtgaaatagacatcagaattaagaaaaacgtagggtccaagtggttccccgttatggactcgctatctgtcaaccagatcttataccctgaagttcacctagatagcccgatagttaccaataagatagtagccatcctggagtatgctcgactgtttaaacctgcaggcatgcaagctgatctttttccctctgccaaaaattatggggacatcatgaagccccttgagcatctgacttctggctaataaaggaaatttattttcattgcaatagtgtgttggaattttttgtgtctctcactcggaaggacatatgggagggcaaatcatttaaaacatcagaatgagtatttggtttagagtttggcaacatatgcccatatgctggctgccatgaacaaaggttggctataaagaggtcatcagtatatgaaacagccccctgctgtccattccttattccatagaaaagccttgacttgaggttagattttttttatattttgttttgtgttatttttttctttaacatccctaaaattttccttacatgttttactagccagatttttcctcctctcctgactactcccagtcatagctgtccctcttctcttatggagatccctcgaggagctttttgcaaaagcccaggcctccaaaaaagcctcttcactacttctggaatagctcagaagccgaggcggcctcggcctctgcataaataaaaaaaattagtcagccatggggcggagaatgggcggaactgggcggagttaggggcgggatgggcggagttaggggcgggactatggttgctgactaattgctgcattaatgaatcggccaacgcgcggggagaggcggtttgcgtattgggcgctcttccgcttcctcgctcactgactcgctgcgctcggtcgttcggctgcggcgagcggtatcagctcactcaaaggcggtaatacggttatccacagaatcaggggataacgcaggaaagaacatgtgagcaaaaggccagcaaaaggccaggaaccgtaaaaaggccgcgttgctggcgtttttccataggctccgcccccctgacgagcatcacaaaaatcgacgctcaagtcagaggtggcgaaacccgacaggactataaagataccaggcgtttccccctggaagctccctcgtgcgctctcctgttccgaccctgccgcttaccggatacctgtccgcctttctcccttcgggaagcgtggcgctttctcatagctcacgctgtaggtatctcagttcggtgtaggtcgttcgctccaagctgggctgtgtgcacgaaccccccgttcagcccgaccgctgcgccttatccggtaactatcgtcttgagtccaacccggtaagacacgacttatcgccactggcagcagccactggtaacaggattagcagagcgaggtatgtaggcggtgctacagagttcttgaagtggtggcctaactacggctacactagaagaacagtatttggtatctgcgctctgctgaagccagttaccttcggaaaaagagttggtagctcttgatccggcaaacaaaccaccgctggtagcggtggtttttttgtttgcaagcagcagattacgcgcagaaaaaaaggatctcaagaagatcctttgatcttttctacggggtctgacgctcagtggaacgaaaactcacgttaagggattttggtcatgagattatcaaaaaggatcttcacctagatccttttaaattaaaaatgaagttttaaatcaatctaaagtatatatgagtaaacttggtctgacagttaccaatgcttaatcagtgaggcacctatctcagcgatctgtctatttcgttcatccatagttgcctgactccccgtcgtgtagataactacgatacgggagggcttaccatctggccccagtgctgcaatgataccgcgagacccacgctcaccggctccagatttatcagcaataaaccagccagccggaagggccgagcgcagaagtggtcctgcaactttatccgcctccatccagtctattaattgttgccgggaagctagagtaagtagttcgccagttaatagtttgcgcaacgttgttgccattgctacaggcatcgtggtgtcacgctcgtcgtttggtatggcttcattcagctccggttcccaacgatcaaggcgagttacatgatcccccatgttgtgcaaaaaagcggttagctccttcggtcctccgatcgttgtcagaagtaagttggccgcagtgttatcactcatggttatggcagcactgcataattctcttactgtcatgccatccgtaagatgcttttctgtgactggtgagtactcaaccaagtcattctgagaatagtgtatgcggcgaccgagttgctcttgcccggcgtcaatacgggataataccgcgccacatagcagaactttaaaagtgctcatcattggaaaacgttcttcggggcgaaaactctcaaggatcttaccgctgttgagatccagttcgatgtaacccactcgtgcacccaactgatcttcagcatcttttactttcaccagcgtttctgggtgagcaaaaacaggaaggcaaaatgccgcaaaaaagggaataagggcgacacggaaatgttgaatactcatactcttcctttttcaatattattgaagcatttatcagggttattgtctcatgagcggatacatatttgaatgtatttagaaaaataaacaaataggggttccgcgcacatttccccgaaaagtgccacctgacgtctaagaaaccattattatcatgacattaacctataaaaataggcgtatcacgaggccctttcgtctcgcgcgtttcggtgatgacggtgaaaacctctgacacatgcagctcccggagacggtcacagcttgtctgtaagcggatgccgggagcagacaagcccgtcagggcgcgtcagcgggtgttggcgggtgtcggggctggcttaactatgcggcatcagagcagattgtactgagagtgcaccattcgacgctctcccttatgcgactcctgcattaggaagcagcccagtagtaggttgaggccgttgagcaccgccgccgcaaggaatggtctggcttatcgaaattaatacgactcactatagggagacc

SEQ ID NO: 189 - DNA, 6905 bp, synthetic construct
  source 1..6905: mol_type = other DNA
ggaattcgagctcgccccgttacataacttacggtaaatggcccgcctggctgaccgcccaacgacccccgcccattgacgtcaataatgacgtatgttcccatagtaacgccaatagggactttccattgacgtcaatgggtggagtatttacggtaaactgcccacttggcagtacatcaagtgtatcatatgccaagtacgccccctattgacgtcaatgacggtaaatggcccgcctggcattatgcccagtacatgaccttatgggactttcctacttggcagtacatctacgtattagtcatcgctattaccatggtgatgcggttttggcagtacatcaatgggcgtggatagcggtttgactcacggggatttccaagtctccaccccattgacgtcaatgggagtttgttttggcaccaaaatcaacgggactttccaaaatgtcgtaacaactccgccccattgacgcaaatgggcggtaggcgtgtacggtgggaggtctatataagcagagctcgtttagtgaaccgtcagatcgcctggagacgccatccacgctgttttgacctccatagaagacaccgggaccgatccagcctccgggggatcgatccccccgatcctgagaacttcagggtgagtttggggacccttgattgttctttctttttcgctattgtaaaattcatgttatatggagggggcaaagttttcagggtgttgtttagaatgggaagatgtcccttgtatcaccatggaccctcatgataattttgtttctttcactttctactctgttgacaaccattgtctcctcttattttcttttcattttctgtaactttttcgttaaactttagcttgcatttgtaacgaatttttaaattcacttttgtttatttgtcagattgtaagtactttctctaatcacttttttttcaaggcaatcagggtatattatattgtacttcagcacagttttagagaacaattgttataattaaatgataaggtagaatatttctgcatataaattctggctggcgtggaaatattcttattggtagaaacaactacatcctggtcatcatcctgcctttctctttatggttacaatgatatacactgtttgagatgaggataaaatactctgagtccaaaccgggcccctctgctaaccatgttcatgccttcttctttttcctacagctcctgggcaacgtgctggttattgtgctgtctcatcattttggcaaagaattgtaatacgactcactatagggcgaattcggatcccccggtagttaattaatacgcgtcactatgaagtgcctgctgtacctggccttcctgttcatcggcgtgaactgcaaggacatccagatgacccagagccccagcagcctgagcgccagcgtgggcgaccgcgtgaccatcacctgcagcgccagcagcagcgtgagctacatgaactggtaccagcagaagcccggcaaggcccccaagcgcctgatctacgacaccagcaagctggccagcggcgtgcccagccgcttcagcggcagcggcagcggcaccgacttcaccctgaccatcagcagcctgcagcccgaggacttcgccacctactactgccagcagtggagcagcaacccccccaccttcggcggcggcaccaaggtggagatcaagggcggcggcggcagcggcggcggcggcagcggcggcggcggcagccaggtgcagctggtgcagagcggcgccgaggtgaagaagcccggcgccagcgtgaaggtgagctgcaaggccagcggctacaccttcatcagctacaccatgcactgggtgcgccaggcccccggccagggcctggagtggatgggctacatcaacccccgcagcggctacacccactacaaccagaagctgaaggacaaggccaccctgaccgccgacaagagcgccagcaccgcctacatggagctgagcagcctgcgcagcgaggacaccgccgtgtactactgcgcccgcagcgcctactacgactacgacggcttcgcctactggggccagggcaccctggtgaccgtgagcagcgcggccgcaagtggtggttctggaggcggtggaagtggtggcggaggtagtgggcccaagttcacgatcgtttttccacacaaccaaaaaggaaactggaaaaatgttccttctaattaccattattgcccgtcaagctcagatttaaattggcataatgacttaataggcacagccttacaagtcaaaatgccccagagtcacaaggctattcaagcagacggttggatgtgtcatgcttccaaatgggtcactacttgtgatttccgctggtatggaccgaagtatataacacattccatccgatccttcactccatctgtagaacaatgcaaggaaagcattgaacaaacgaaacaaggaacttggctgaatccaggcttccctcctcaaagttgtggatatgcaactgtgacggatgccgaagcagtgattgtccaggtgactcctcaccatgtgctggttgatgaatacacaggagaatgggttgattcacagttcatcaacggaaaatgcagcaattacatatgccccactgtccataactctacaacctggcattctgactataaggtcaaagggctatgtgattctaacctcatttccatggacatcaccttcttctcagaggacggagagctatcatccctgggaaaggagggcacagggttcagaagtaactactttgcttatgaaactggaggcaaggcctgcaaaatgcaatactgcaagcattggggagtcagactcccatcaggtgtctggttcgagatggctgataaggatctctttgctgcagccagattccctgaatgcccagaagggtcaagtatctctgctccatctcagacctcagtggatgtaagtctaattcaggacgttgagaggatcttggattattccctctgccaagaaacctggagcaaaatcagagcgggtcttccaatctctccagtggatctcagctatcttgctcctaaaaacccaggaaccggtcctgctttcaccataatcaatggtaccctaaaatactttgagaccagatacatcagagtcgatattgctgctccaatcctctcaagaatggtcggaatgatctccggaactaccacagaacaggaactgtgggatgactgggcgccatatgaagacgtggaaattggacccaatggagttctgaggaccagttcaggatataagtttcctttatacatgattggacatggtatgttggactccgatcttcatcttagctcaaaggctcaggtgttcgaacatcctcacattcaagacgctgcttcgcaacttcctgatgatgagagtttattttttggtgatactgggctatccaaaaatccaatcgagcttgtagaaggttggttcagtagttggaaaagctctattgcctcttttttctttatcatagggttaatcattggactattcttggttctccgagttggtatccatctttgcattaaattaaagcacaccaagaaaagacagatttatacagacatagagatgaaccgacttggaaagtaactcaaatcctgctaggtatgaaaaaaactaacagatatcacgcctaggactagtgtgaaatagacatcagaattaagaaaaacgtagggtccaagtggttccccgttatggactcgctatctgtcaaccagatcttataccctgaagttcacctagatagcccgatagttaccaataagatagtagccatcctggagtatgctcgactgtttaaacctgcaggcatgcaagctgatctttttccctctgccaaaaattatggggacatcatgaagccccttgagcatctgacttctggctaataaaggaaatttattttcattgcaatagtgtgttggaattttttgtgtctctcactcggaaggacatatgggagggcaaatcatttaaaacatcagaatgagtatttggtttagagtttggcaacatatgcccatatgctggctgccatgaacaaaggttggctataaagaggtcatcagtatatgaaacagccccctgctgtccattccttattccatagaaaagccttgacttgaggttagattttttttatattttgttttgtgttatttttttctttaacatccctaaaattttccttacatgttttactagccagatttttcctcctctcctgactactcccagtcatagctgtccctcttctcttatggagatccctcgaggagctttttgcaaaagcctaggcctccaaaaaagcctcttcactacttctggaatagctcagaagccgaggcggcctcggcctctgcataaataaaaaaaattagtcagccatggggcggagaatgggcggaactgggcggagttaggggcgggatgggcggagttaggggcgggactatggttgctgactaattgctgcattaatgaatcggccaacgcgcggggagaggcggtttgcgtattgggcgctcttccgcttcctcgctcactgactcgctgcgctcggtcgttcggctgcggcgagcggtatcagctcactcaaaggcggtaatacggttatccacagaatcaggggataacgcaggaaagaacatgtgagcaaaaggccagcaaaaggccaggaaccgtaaaaaggccgcgttgctggcgtttttccataggctccgcccccctgacgagcatcacaaaaatcgacgctcaagtcagaggtggcgaaacccgacaggactataaagataccaggcgtttccccctggaagctccctcgtgcgctctcctgttccgaccctgccgcttaccggatacctgtccgcctttctcccttcgggaagcgtggcgctttctcatagctcacgctgtaggtatctcagttcggtgtaggtcgttcgctccaagctgggctgtgtgcacgaaccccccgttcagcccgaccgctgcgccttatccggtaactatcgtcttgagtccaacccggtaagacacgacttatcgccactggcagcagccactggtaacaggattagcagagcgaggtatgtaggcggtgctacagagttcttgaagtggtggcctaactacggctacactagaagaacagtatttggtatctgcgctctgctgaagccagttaccttcggaaaaagagttggtagctcttgatccggcaaacaaaccaccgctggtagcggtggtttttttgtttgcaagcagcagattacgcgcagaaaaaaaggatctcaagaagatcctttgatcttttctacggggtctgacgctcagtggaacgaaaactcacgttaagggattttggtcatgagattatcaaaaaggatcttcacctagatccttttaaattaaaaatgaagttttaaatcaatctaaagtatatatgagtaaacttggtctgacagttaccaatgcttaatcagtgaggcacctatctcagcgatctgtctatttcgttcatccatagttgcctgactccccgtcgtgtagataactacgatacgggagggcttaccatctggccccagtgctgcaatgataccgcgagacccacgctcaccggctccagatttatcagcaataaaccagccagccggaagggccgagcgcagaagtggtcctgcaactttatccgcctccatccagtctattaattgttgccgggaagctagagtaagtagttcgccagttaatagtttgcgcaacgttgttgccattgctacaggcatcgtggtgtcacgctcgtcgtttggtatggcttcattcagctccggttcccaacgatcaaggcgagttacatgatcccccatgttgtgcaaaaaagcggttagctccttcggtcctccgatagttgtcagaagtaagttggccgcagtgttatcactcatggttatggcagcactgcataattctcttactgtcatgccatccgtaagatgcttttctgtgactggtgagtactcaaccaagtcattctgagaatagtgtatgcggcgaccgagttgctcttgcccggcgtcaatacgggataataccgcgccacatagcagaactttaaaagtgctcatcattggaaaacgttcttcggggcgaaaactctcaaggatcttaccgctgttgagatccagttcgatgtaacccactcgtgcacccaactgatcttcagcatcttttactttcaccagcgtttctgggtgagcaaaaacaggaaggcaaaatgccgcaaaaaagggaataagggcgacacggaaatgttgaatactcatactcttcctttttcaatattattgaagcatttatcagggttattgtctcatgagcggatacatatttgaatgtatttagaaaaataaacaaataggggttccgcgcacatttccccgaaaagtgccacctgacgtctaagaaaccattattatcatgacattaacctataaaaataggcgtatcacgaggccctttcgtctcgcgcgtttcggtgatgacggtgaaaacctctgacacatgcagctcccggagacggtcacagcttgtctgtaagcggatgccgggagcagacaagcccgtcagggcgcgtcagcgggtgttggcgggtgtcggggctggcttaactatgcggcatcagagcagattgtactgagagtgcaccattcgacgctctcccttatgcgactcctgcattaggaagcagcccagtagtaggttgaggccgttgagcaccgccgccgcaaggaatggtctggcttatcgaaattaatacgactcactatagggagacc

SEQ ID NO: 190 - DNA, 6905 bp, synthetic construct
  source 1..6905: mol_type = other DNA
ggaattcgagctcgccccgttacataacttacggtaaatggcccgcctggctgaccgcccaacgacccccgcccattgacgtcaataatgacgtatgttcccatagtaacgccaatagggactttccattgacgtcaatgggtggagtatttacggtaaactgcccacttggcagtacatcaagtgtatcatatgccaagtacgccccctattgacgtcaatgacggtaaatggcccgcctggcattatgcccagtacatgaccttatgggactttcctacttggcagtacatctacgtattagtcatcgctattaccatggtgatgcggttttggcagtacatcaatgggcgtggatagcggtttgactcacggggatttccaagtctccaccccattgacgtcaatgggagtttgttttggcaccaaaatcaacgggactttccaaaatgtcgtaacaactccgccccattgacgcaaatgggcggtaggcgtgtacggtgggaggtctatataagcagagctcgtttagtgaaccgtcagatcgcctggagacgccatccacgctgttttgacctccatagaagacaccgggaccgatccagcctccgggggatcgatccccccgatcctgagaacttcagggtgagtttggggacccttgattgttctttctttttcgctattgtaaaattcatgttatatggagggggcaaagttttcagggtgttgtttagaatgggaagatgtcccttgtatcaccatggaccctcatgataattttgtttctttcactttctactctgttgacaaccattgtctcctcttattttcttttcattttctgtaactttttcgttaaactttagcttgcatttgtaacgaatttttaaattcacttttgtttatttgtcagattgtaagtactttctctaatcacttttttttcaaggcaatcagggtatattatattgtacttcagcacagttttagagaacaattgttataattaaatgataaggtagaatatttctgcatataaattctggctggcgtggaaatattcttattggtagaaacaactacatcctggtcatcatcctgcctttctctttatggttacaatgatatacactgtttgagatgaggataaaatactctgagtccaaaccgggcccctctgctaaccatgttcatgccttcttctttttcctacagctcctgggcaacgtgctggttattgtgctgtctcatcattttggcaaagaattgtaatacgactcactatagggcgaattcggatcccccggtagttaattaatacgcgtcactatgaagtgcctgctgtacctggccttcctgttcatcggcgtgaactgcaagcagatcgtgctgacccagagccccgccatcatgagcgccagccccggcgagaaggtgaccatgacctgcagcgccagcagcagcgtgagctacatgaactggtaccagcagaagagcggcaccagccccaagcgctggatctacgacaccagcaagctggccagcggcgtgcccgcccacttccgcggcagcggcagcggcaccagctacagcctgaccatcagcggcatggaggccgaggacgccgccacctactactgccagcagtggagcagcaaccccttcaccttcggcagcggcaccaagctggagatcaaccgcggcggcggcggcagcggcggcggcggcagcggcggcggcggcagccaggtgcagctgcagcagagcggcgccgagctggcccgccccggcgccagcgtgaagatgagctgcaaggccagcggctacaccttcacccgctacaccatgcactgggtgaagcagcgccccggccagggcctggagtggatcggctacatcaaccccagccgcggctacaccaactacaaccagaagttcaaggacaaggccaccctgaccaccgacaagagcagcagcaccgcctacatgcagctgagcagcctgaccagcgaggacagcgccgtgtactactgcgcccgctactacgacgaccactactgcctggactactggggccagggcaccaccctgaccgtgagcagcgcggccgcaagtggtggttctggaggcggtggaagtggtggcggaggtagtgggcccaagttcacgatcgtttttccacacaaccaaaaaggaaactggaaaaatgttccttctaattaccattattgcccgtcaagctcagatttaaattggcataatgacttaataggcacagccttacaagtcaaaatgccccagagtcacaaggctattcaagcagacggttggatgtgtcatgcttccaaatgggtcactacttgtgatttccgctggtatggaccgaagtatataacacattccatccgatccttcactccatctgtagaacaatgcaaggaaagcattgaacaaacgaaacaaggaacttggctgaatccaggcttccctcctcaaagttgtggatatgcaactgtgacggatgccgaagcagtgattgtccaggtgactcctcaccatgtgctggttgatgaatacacaggagaatgggttgattcacagttcatcaacggaaaatgcagcaattacatatgccccactgtccataactctacaacctggcattctgactataaggtcaaagggctatgtgattctaacctcatttccatggacatcaccttcttctcagaggacggagagctatcatccctgggaaaggagggcacagggttcagaagtaactactttgcttatgaaactggaggcaaggcctgcaaaatgcaatactgcaagcattggggagtcagactcccatcaggtgtctggttcgagatggctgataaggatctctttgctgcagccagattccctgaatgcccagaagggtcaagtatctctgctccatctcagacctcagtggatgtaagtctaattcaggacgttgagaggatcttggattattccctctgccaagaaacctggagcaaaatcagagcgggtcttccaatctctccagtggatctcagctatcttgctcctaaaaacccaggaaccggtcctgctttcaccataatcaatggtaccctaaaatactttgagaccagatacatcagagtcgatattgctgctccaatcctctcaagaatggtcggaatgatctccggaactaccacagaacaggaactgtgggatgactgggcgccatatgaagacgtggaaattggacccaatggagttctgaggaccagttcaggatataagtttcctttatacatgattggacatggtatgttggactccgatcttcatcttagctcaaaggctcaggtgttcgaacatcctcacattcaagacgctgcttcgcaacttcctgatgatgagagtttattttttggtgatactgggctatccaaaaatccaatcgagcttgtagaaggttggttcagtagttggaaaagctctattgcctcttttttctttatcatagggttaatcattggactattcttggttctccgagttggtatccatctttgcattaaattaaagcacaccaagaaaagacagatttatacagacatagagatgaaccgacttggaaagtaactcaaatcctgctaggtatgaaaaaaactaacagatatcacgcctaggactagtgtgaaatagacatcagaattaagaaaaacgtagggtccaagtggttccccgttatggactcgctatctgtcaaccagatcttataccctgaagttcacctagatagcccgatagttaccaataagatagtagccatcctggagtatgctcgactgtttaaacctgcaggcatgcaagctgatctttttccctctgccaaaaattatggggacatcatgaagccccttgagcatctgacttctggctaataaaggaaatttattttcattgcaatagtgtgttggaattttttgtgtctctcactcggaaggacatatgggagggcaaatcatttaaaacatcagaatgagtatttggtttagagtttggcaacatatgcccatatgctggctgccatgaacaaaggttggctataaagaggtcatcagtatatgaaacagccccctgctgtccattccttattccatagaaaagccttgacttgaggttagattttttttatattttgttttgtgttatttttttctttaacatccctaaaattttccttacatgttttactagccagatttttcctcctctcctgactactcccagtcatagctgtccctcttctcttatggagatccctcgaggagctttttgcaaaagcctaggcctccaaaaaagcctcttcactacttctggaatagctcagaagccgaggcggcctcggcctctgcataaataaaaaaaattagtcagccatggggcggagaatgggcggaactgggcggagttaggggcgggatgggcggagttaggggcgggactatggttgctgactaattgctgcattaatgaatcggccaacgcgcggggagaggcggtttgcgtattgggcgctcttccgcttcctcgctcactgactcgctgcgctcggtcgttcggctgcggcgagcggtatcagctcactcaaaggcggtaatacggttatccacagaatcaggggataacgcaggaaagaacatgtgagcaaaaggccagcaaaaggccaggaaccgtaaaaaggccgcgttgctggcgtttttccataggctccgcccccctgacgagcatcacaaaaatcgacgctcaagtcagaggtggcgaaacccgacaggactataaagataccaggcgtttccccctggaagctccctcgtgcgctctcctgttccgaccctgccgcttaccggatacctgtccgcctttctcccttcgggaagcgtggcgctttctcatagctcacgctgtaggtatctcagttcggtgtaggtcgttcgctccaagctgggctgtgtgcacgaaccccccgttcagcccgaccgctgcgccttatccggtaactatcgtcttgagtccaacccggtaagacacgacttatcgccactggcagcagccactggtaacaggattagcagagcgaggtatgtaggcggtgctacagagttcttgaagtggtggcctaactacggctacactagaagaacagtatttggtatctgcgctctgctgaagccagttaccttcggaaaaagagttggtagctcttgatccggcaaacaaaccaccgctggtagcggtggtttttttgtttgcaagcagcagattacgcgcagaaaaaaaggatctcaagaagatcctttgatcttttctacggggtctgacgctcagtggaacgaaaactcacgttaagggattttggtcatgagattatcaaaaaggatcttcacctagatccttttaaattaaaaatgaagttttaaatcaatctaaagtatatatgagtaaacttggtctgacagttaccaatgcttaatcagtgaggcacctatctcagcgatctgtctatttcgttcatccatagttgcctgactccccgtcgtgtagataactacgatacgggagggcttaccatctggccccagtgctgcaatgataccgcgagacccacgctcaccggctccagatttatcagcaataaaccagccagccggaagggccgagcgcagaagtggtcctgcaactttatccgcctccatccagtctattaattgttgccgggaagctagagtaagtagttcgccagttaatagtttgcgcaacgttgttgccattgctacaggcatcgtggtgtcacgctcgtcgtttggtatggcttcattcagctccggttcccaacgatcaaggcgagttacatgatcccccatgttgtgcaaaaaagcggttagctccttcggtcctccgatagttgtcagaagtaagttggccgcagtgttatcactcatggttatggcagcactgcataattctcttactgtcatgccatccgtaagatgcttttctgtgactggtgagtactcaaccaagtcattctgagaatagtgtatgcggcgaccgagttgctcttgcccggcgtcaatacgggataataccgcgccacatagcagaactttaaaagtgctcatcattggaaaacgttcttcggggcgaaaactctcaaggatcttaccgctgttgagatccagttcgatgtaacccactcgtgcacccaactgatcttcagcatcttttactttcaccagcgtttctgggtgagcaaaaacaggaaggcaaaatgccgcaaaaaagggaataagggcgacacggaaatgttgaatactcatactcttcctttttcaatattattgaagcatttatcagggttattgtctcatgagcggatacatatttgaatgtatttagaaaaataaacaaataggggttccgcgcacatttccccgaaaagtgccacctgacgtctaagaaaccattattatcatgacattaacctataaaaataggcgtatcacgaggccctttcgtctcgcgcgtttcggtgatgacggtgaaaacctctgacacatgcagctcccggagacggtcacagcttgtctgtaagcggatgccgggagcagacaagcccgtcagggcgcgtcagcgggtgttggcgggtgtcggggctggcttaactatgcggcatcagagcagattgtactgagagtgcaccattcgacgctctcccttatgcgactcctgcattaggaagcagcccagtagtaggttgaggccgttgagcaccgccgccgcaaggaatggtctggcttatcgaaattaatacgactcactatagggagacc

SEQ ID NO: 191 - DNA, 6905 bp, synthetic construct; identical to SEQ ID NO: 190
  source 1..6905: mol_type = other DNA

SEQ ID NO: 192 - DNA, 6902 bp, synthetic construct
  source 1..6902: mol_type = other DNA
ggaattcgagctcgccccgttacataacttacggtaaatggcccgcctggctgaccgcccaacgacccccgcccattgacgtcaataatgacgtatgttcccatagtaacgccaatagggactttccattgacgtcaatgggtggagtatttacggtaaactgcccacttggcagtacatcaagtgtatcatatgccaagtacgccccctattgacgtcaatgacggtaaatggcccgcctggcattatgcccagtacatgaccttatgggactttcctacttggcagtacatctacgtattagtcatcgctattaccatggtgatgcggttttggcagtacatcaatgggcgtggatagcggtttgactcacggggatttccaagtctccaccccattgacgtcaatgggagtttgttttggcaccaaaatcaacgggactttccaaaatgtcgtaacaactccgccccattgacgcaaatgggcggtaggcgtgtacggtgggaggtctatataagcagagctcgtttagtgaaccgtcagatcgcctggagacgccatccacgctgttttgacctccatagaagacaccgggaccgatccagcctccgggggatcgatccccccgatcctgagaacttcagggtgagtttggggacccttgattgttctttctttttcgctattgtaaaattcatgttatatggagggggcaaagttttcagggtgttgtttagaatgggaagatgtcccttgtatcaccatggaccctcatgataattttgtttctttcactttctactctgttgacaaccattgtctcctcttattttcttttcattttctgtaactttttcgttaaactttagcttgcatttgtaacgaatttttaaattcacttttgtttatttgtcagattgtaagtactttctctaatcacttttttttcaaggcaatcagggtatattatattgtacttcagcacagttttagagaacaattgttataattaaatgataaggtagaatatttctgcatataaattctggctggcgtggaaatattcttattggtagaaacaactacatcctggtcatcatcctgcctttctctttatggttacaatgatatacactgtttgagatgaggataaaatactctgagtccaaaccgggcccctctgctaaccatgttcatgccttcttctttttcctacagctcctgggcaacgtgctggttattgtgctgtctcatcattttggcaaagaattgtaatacgactcactatagggcgaattcggatcccccggtagttaattaatacgcgtcactatgaagtgcctgctgtacctggccttcctgttcatcggcgtgaactgcaagcagatcgtgctgacccagagccccgccatcatgagcgccagccccggcgagaaggtgaccatgacctgccgcgccagcagcagcgtgagctacatgaactggtaccagcagaagagcggcaccagccccaagcgctggatctacgacaccagcaaggtggccagcggcgtgccctaccgcttcagcggcagcggcagcggcaccagctacagcctgaccatcagcagcatggaggccgaggacgccgccacctactactgccagcagtggagcagcaaccccctgaccttcggcgccggcaccaagctggagctgaagggcggcggcggcagcggcggcggcggcagcggcggcggcggcagccaggtgcagctgcagcagagcggcgccgagctggcccgccccggcgccagcgtgaagatgagctgcaagaccagcggctacaccttcacccgctacaccatgcactgggtgaagcagcgccccggccagggcctggagtggatcggctacatcaaccccagccgcggctacaccaactacaaccagaagttcaaggacaaggccaccctgaccaccgacaagagcagcagcaccgcctacatgcagctgagcagcctgaccagcgaggacagcgccgtgtactactgcgcccgctactacgacgaccactacagcctggactactggggccagggcaccaccctgaccgtgagcagcgcggccgcaagtggtggttctggaggcggtggaagtggtggcggaggtagtgggcccaagttcacgatcgtttttccacacaaccaaaaaggaaactggaaaaatgttccttctaattaccattattgcccgtcaagctcagatttaaattggcataatgacttaataggcacagccttacaagtcaaaatgccccagagtcacaaggctattcaagcagacggttggatgtgtcatgcttccaaatgggtcactacttgtgatttccgctggtatggaccgaagtatataacacattccatccgatccttcactccatctgtagaacaatgcaaggaaagcattgaacaaacgaaacaaggaacttggctgaatccaggcttccctcctcaaagttgtggatatgcaactgtgacggatgccgaagcagtgattgtccaggtgactcctcaccatgtgctggttgatgaatacacaggagaatgggttgattcacagttcatcaacggaaaatgcagcaattacatatgccccactgtccataactctacaacctggcattctgactataaggtcaaagggctatgtgattctaacctcatttccatggacatcaccttcttctcagaggacggagagctatcatccctgggaaaggagggcacagggttcagaagtaactactttgcttatgaaactggaggcaaggcctgcaaaatgcaatactgcaagcattggggagtcagactcccatcaggtgtctggttcgagatggctgataaggatctctttgctgcagccagattccctgaatgcccagaagggtcaagtatctctgctccatctcagacctcagtggatgtaagtctaattcaggacgttgagaggatcttggattattccctctgccaagaaacctggagcaaaatcagagcgggtcttccaatctctccagtggatctcagctatcttgctcctaaaaacccaggaaccggtcctgctttcaccataatcaatggtaccctaaaatactttgagaccagatacatcagagtcgatattgctgctccaatcctctcaagaatggtcggaatgatctccggaactaccacagaacaggaactgtgggatgactgggcgccatatgaagacgtggaaattggacccaatggagttctgaggaccagttcaggatataagtttcctttatacatgattggacatggtatgttggactccgatcttcatcttagctcaaaggctcaggtgttcgaacatcctcacattcaagacgctgcttcgcaacttcctgatgatgagagtttattttttggtgatactgggctatccaaaaatccaatcgagcttgtagaaggttggttcagtagttggaaaagctctattgcctcttttttctttatcatagggttaatcattggactattcttggttctccgagttggtatccatctttgcattaaattaaagcacaccaagaaaagacagatttatacagacatagagatgaaccgacttggaaagtaactcaaatcctgctaggtatgaaaaaaactaacagatatcacgcctaggactagtgtgaaatagacatcagaattaagaaaaacgtagggtccaagtggttccccgttatggactcgctatctgtcaaccagatcttataccctgaagttcacctagatagcccgatagttaccaataagatagtagccatcctggagtatgctcgactgtttaaacctgcaggcatgcaagctgatctttttccctctgccaaaaattatggggacatcatgaagccccttgagcatctgacttctggctaataaaggaaatttattttcattgcaatagtgtgttggaattttttgtgtctctcactcggaaggacatatgggagggcaaatcatttaaaacatcagaatgagtatttggtttagagtttggcaacatatgcccatatgctggctgccatgaacaaaggttggctataaagaggtcatcagtatatgaaacagccccctgctgtccattccttattccatagaaaagccttgacttgaggttagattttttttatattttgttttgtgttatttttttctttaacatccctaaaattttccttacatgttttactagccagatttttcctcctctcctgactactcccagtcatagctgtccctcttctcttatggagatccctcgaggagctttttgcaaaagcctaggcctccaaaaaagcctcttcactacttctggaatagctcagaagccgaggcggcctcggcctctgcataaataaaaaaaattagtcagccatggggcggagaatgggcggaactgggcggagttaggggcgggatgggcggagttaggggcgggactatggttgctgactaattgctgcattaatgaatcggccaacgcgcggggagaggcggtttgcgtattgggcgctcttccgcttcctcgctcactgactcgctgcgctcggtcgttcggctgcggcgagcggtatcagctcactcaaaggcggtaatacggttatccacagaatcaggggataacgcaggaaagaacatgtgagcaaaaggccagcaaaaggccaggaaccgtaaaaaggccgcgttgctggcgtttttccataggctccgcccccctgacgagcatcacaaaaatcgacgctcaagtcagaggtggcgaaacccgacaggactataaagataccaggcgtttccccctggaagctccctcgtgcgctctcctgttccgaccctgccgcttaccggatacctgtccgcctttctcccttcgggaagcgtggcgctttctcatagctcacgctgtaggtatctcagttcggtgtaggtcgttcgctccaagctgggctgtgtgcacgaaccccccgttcagcccgaccgctgcgccttatccggtaactatcgtcttgagtccaacccggtaagacacgacttatcgccactggcagcagccactggtaacaggattagcagagcgaggtatgtaggcggtgctacagagttcttgaagtggtggcctaactacggctacactagaagaacagtatttggtatctgcgctctgctgaagccagttaccttcggaaaaagagttggtagctcttgatccggcaaacaaaccaccgctggtagcggtggtttttttgtttgcaagcagcagattacgcgcagaaaaaaaggatctcaagaagatcctttgatcttttctacggggtctgacgctcagtggaacgaaaactcacgttaagggattttggtcatgagattatcaaaaaggatcttcacctagatccttttaaattaaaaatgaagttttaaatcaatctaaagtatatatgagtaaacttggtctgacagttaccaatgcttaatcagtgaggcacctatctcagcgatctgtctatttcgttcatccatagttgcctgactccccgtcgtgtagataactacgatacgggagggcttaccatctggccccagtgctgcaatgataccgcgagacccacgctcaccggctccagatttatcagcaataaaccagccagccggaagggccgagcgcagaagtggtcctgcaactttatccgcctccatccagtctattaattgttgccgggaagctagagtaagtagttcgccagttaatagtttgcgcaacgttgttgccattgctacaggcatcgtggtgtcacgctcgtcgtttggtatggcttcattcagctccggttcccaacgatcaaggcgagttacatgatcccccatgttgtgcaaaaaagcggttagctccttcggtcctccgatagttgtcagaagtaagttggccgcagtgttatcactcatggttatggcagcactgcataattctcttactgtcatgccatccgtaagatgcttttctgtgactggtgagtactcaaccaagtcattctgagaatagtgtatgcggcgaccgagttgctcttgcccggcgtcaatacgggataataccgcgccacatagcagaactttaaaagtgctcatcattggaaaacgttcttcggggcgaaaactctcaaggatcttaccgctgttgagatccagttcgatgtaacccactcgtgcacccaactgatcttcagcatcttttactttcaccagcgtttctgggtgagcaaaaacaggaaggcaaaatgccgcaaaaaagggaataagggcgacacggaaatgttgaatactcatactcttcctttttcaatattattgaagcatttatcagggttattgtctcatgagcggatacatatttgaatgtatttagaaaaataaacaaataggggttccgcgcacatttccccgaaaagtgccacctgacgtctaagaaaccattattatcatgacattaacctataaaaataggcgtatcacgaggccctttcgtctcgcgcgtttcggtgatgacggtgaaaacctctgacacatgcagctcccggagacggtcacagcttgtctgtaagcggatgccgggagcagacaagcccgtcagggcgcgtcagcgggtgttggcgggtgtcggggctggcttaactatgcggcatcagagcagattgtactgagagtgcaccattcgacgctctcccttatgcgactcctgcattaggaagcagcccagtagtaggttgaggccgttgagcaccgccgccgcaaggaatggtctggcttatcgaaattaatacgactcactatagggagacc

SEQ ID NO: 193 - DNA, 6914 bp, synthetic construct
  source 1..6914: mol_type = other DNA
ggaattcgagctcgccccgttacataacttacggtaaatggcccgcctggctgaccgcccaacgacccccgcccattgacgtcaataatgacgtatgttcccatagtaacgccaatagggactttccattgacgtcaatgggtggagtatttacggtaaactgcccacttggcagtacatcaagtgtatcatatgccaagtacgccccctattgacgtcaatgacggtaaatggcccgcctggcattatgcccagtacatgaccttatgggactttcctacttggcagtacatctacgtattagtcatcgctattaccatggtgatgcggttttggcagtacatcaatgggcgtggatagcggtttgactcacggggatttccaagtctccaccccattgacgtcaatgggagtttgttttggcaccaaaatcaacgggactttccaaaatgtcgtaacaactccgccccattgacgcaaatgggcggtaggcgtgtacggtgggaggtctatataagcagagctcgtttagtgaaccgtcagatcgcctggagacgccatccacgctgttttgacctccatagaagacaccgggaccgatccagcctccgggggatcgatccccccgatcctgagaacttcagggtgagtttggggacccttgattgttctttctttttcgctattgtaaaattcatgttatatggagggggcaaagttttcagggtgttgtttagaatgggaagatgtcccttgtatcaccatggaccctcatgataattttgtttctttcactttctactctgttgacaaccattgtctcctcttattttcttttcattttctgtaactttttcgttaaactttagcttgcatttgtaacgaatttttaaattcacttttgtttatttgtcagattgtaagtactttctctaatcacttttttttcaaggcaatcagggtatattatattgtacttcagcacagttttagagaacaattgttataattaaatgataaggtagaatatttctgcatataaattctggctggcgtggaaatattcttattggtagaaacaactacatcctggtcatcatcctgcctttctctttatggttacaatgatatacactgtttgagatgaggataaaatactctgagtccaaaccgggcccctctgctaaccatgttcatgccttcttctttttcctacagctcctgggcaacgtgctggttattgtgctgtctcatcattttggcaaagaattgtaatacgactcactatagggcgaattcggatcccccggtagttaattaatacgcgtcactatgaagtgcctgctgtacctggccttcctgttcatcggcgtgaactgcaaggaggtgcagctggtggagagcggcggcggcctggtgcagcccggcggcagcctgcgcctgagctgcgccgccagcggctacagcttcaccggctacaccatgaactgggtgcgccaggcccccggcaagggcctggagtgggtggccctgatcaacccctacaagggcgtgagcacctacaaccagaagttcaaggaccgcttcaccatcagcgtggacaagagcaagaacaccgcctacctgcagatgaacagcctgcgcgccgaggacaccgccgtgtactactgcgcccgcagcggctactacggcgacagcgactggtacttcgacgtgtggggccagggcaccctggtgaccgtgagcagcggcggcggcggcagcggcggcggcggcagcggcggcggcggcagcgacatccagatgacccagagccccagcagcctgagcgccagcgtgggcgaccgcgtgaccatcacctgccgcgccagccaggacatccgcaactacctgaactggtaccagcagaagcccggcaaggcccccaagctgctgatctactacaccagccgcctggagagcggcgtgcccagccgcttcagcggcagcggcagcggcaccgactacaccctgaccatcagcagcctgcagcccgaggacttcgccacctactactgccagcagggcaacaccctgccctggaccttcggccagggcaccaaggtggagatcaaggcggccgcaagtggtggttctggaggcggtggaagtggtggcggaggtagtgggcccaagttcacgatcgtttttccacacaaccaaaaaggaaactggaaaaatgttccttctaattaccattattgcccgtcaagctcagatttaaattggcataatgacttaataggcacagccttacaagtcaaaatgccccagagtcacaaggctattcaagcagacggttggatgtgtcatgcttccaaatgggtcactacttgtgatttccgctggtatggaccgaagtatataacacattccatccgatccttcactccatctgtagaacaatgcaaggaaagcattgaacaaacgaaacaaggaacttggctgaatccaggcttccctcctcaaagttgtggatatgcaactgtgacggatgccgaagcagtgattgtccaggtgactcctcaccatgtgctggttgatgaatacacaggagaatgggttgattcacagttcatcaacggaaaatgcagcaattacatatgccccactgtccataactctacaacctggcattctgactataaggtcaaagggctatgtgattctaacctcatttccatggacatcaccttcttctcagaggacggagagctatcatccctgggaaaggagggcacagggttcagaagtaactactttgcttatgaaactggaggcaaggcctgcaaaatgcaatactgcaagcattggggagtcagactcccatcaggtgtctggttcgagatggctgataaggatctctttgctgcagccagattccctgaatgcccagaagggtcaagtatctctgctccatctcagacctcagtggatgtaagtctaattcaggacgttgagaggatcttggattattccctctgccaagaaacctggagcaaaatcagagcgggtcttccaatctctccagtggatctcagctatcttgctcctaaaaacccaggaaccggtcctgctttcaccataatcaatggtaccctaaaatactttgagaccagatacatcagagtcgatattgctgctccaatcctctcaagaatggtcggaatgatctccggaactaccacagaacaggaactgtgggatgactgggcgccatatgaagacgtggaaattggacccaatggagttctgaggaccagttcaggatataagtttcctttatacatgattggacatggtatgttggactccgatcttcatcttagctcaaaggctcaggtgttcgaacatcctcacattcaagacgctgcttcgcaacttcctgatgatgagagtttattttttggtgatactgggctatccaaaaatccaatcgagcttgtagaaggttggttcagtagttggaaaagctctattgcctcttttttctttatcatagggttaatcattggactattcttggttctccgagttggtatccatctttgcattaaattaaagcacaccaagaaaagacagatttatacagacatagagatgaaccgacttggaaagtaactcaaatcctgctaggtatgaaaaaaactaacagatatcacgcctaggactagtgtgaaatagacatcagaattaagaaaaacgtagggtccaagtggttccccgttatggactcgctatctgtcaaccagatcttataccctgaagttcacctagatagcccgatagttaccaataagatagtagccatcctggagtatgctcgactgtttaaacctgcaggcatgcaagctgatctttttccctctgccaaaaattatggggacatcatgaagccccttgagcatctgacttctggctaataaaggaaatttattttcattgcaatagtgtgttggaattttttgtgtctctcactcggaaggacatatgggagggcaaatcatttaaaacatcagaatgagtatttggtttagagtttggcaacatatgcccatatgctggctgccatgaacaaaggttggctataaagaggtcatcagtatatgaaacagccccctgctgtccattccttattccatagaaaagccttgacttgaggttagattttttttatattttgttttgtgttatttttttctttaacatccctaaaattttccttacatgttttactagccagatttttcctcctctcctgactactcccagtcatagctgtccctcttctcttatggagatccctcgaggagctttttgcaaaagcctaggcctccaaaaaagcctcttcactacttctggaatagctcagaagccgaggcggcctcggcctctgcataaataaaaaaaattagtcagccatggggcggagaatgggcggaactgggcggagttaggggcgggatgggcggagttaggggcgggactatggttgctgactaattgctgcattaatgaatcggccaacgcgcggggagaggcggtttgcgtattgggcgctcttccgcttcctcgctcactgactcgctgcgctcggtcgttcggctgcggcgagcggtatcagctcactcaaaggcggtaatacggttatccacagaatcaggggataacgcaggaaagaacatgtgagcaaaaggccagcaaaaggccaggaaccgtaaaaaggccgcgttgctggcgtttttccataggctccgcccccctgacgagcatcacaaaaatcgacgctcaagtcagaggtggcgaaacccgacaggactataaagataccaggcgtttccccctggaagctccctcgtgcgctctcctgttccgaccctgccgcttaccggatacctgtccgcctttctcccttcgggaagcgtggcgctttctcatagctcacgctgtaggtatctcagttcggtgtaggtcgttcgctccaagctgggctgtgtgcacgaaccccccgttcagcccgaccgctgcgccttatccggtaactatcgtcttgagtccaacccggtaagacacgacttatcgccactggcagcagccactggtaacaggattagcagagcgaggtatgtaggcggtgctacagagttcttgaagtggtggcctaactacggctacactagaagaacagtatttggtatctgcgctctgctgaagccagttaccttcggaaaaagagttggtagctcttgatccggcaaacaaaccaccgctggtagcggtggtttttttgtttgcaagcagcagattacgcgcagaaaaaaaggatctcaagaagatcctttgatcttttctacggggtctgacgctcagtggaacgaaaactcacgttaagggattttggtcatgagattatcaaaaaggatcttcacctagatccttttaaattaaaaatgaagttttaaatcaatctaaagtatatatgagtaaacttggtctgacagttaccaatgcttaatcagtgaggcacctatctcagcgatctgtctatttcgttcatccatagttgcctgactccccgtcgtgtagataactacgatacgggagggcttaccatctggccccagtgctgcaatgataccgcgagacccacgctcaccggctccagatttatcagcaataaaccagccagccggaagggccgagcgcagaagtggtcctgcaactttatccgcctccatccagtctattaattgttgccgggaagctagagtaagtagttcgccagttaatagtttgcgcaacgttgttgccattgctacaggcatcgtggtgtcacgctcgtcgtttggtatggcttcattcagctccggttcccaacgatcaaggcgagttacatgatcccccatgttgtgcaaaaaagcggttagctccttcggtcctccgatagttgtcagaagtaagttggccgcagtgttatcactcatggttatggcagcactgcataattctcttactgtcatgccatccgtaagatgcttttctgtgactggtgagtactcaaccaagtcattctgagaatagtgtatgcggcgaccgagttgctcttgcccggcgtcaatacgggataataccgcgccacatagcagaactttaaaagtgctcatcattggaaaacgttcttcggggcgaaaactctcaaggatcttaccgctgttgagatccagttcgatgtaacccactcgtgcacccaactgatcttcagcatcttttactttcaccagcgtttctgggtgagcaaaaacaggaaggcaaaatgccgcaaaaaagggaataagggcgacacggaaatgttgaatactcatactcttcctttttcaatattattgaagcatttatcagggttattgtctcatgagcggatacatatttgaatgtatttagaaaaataaacaaataggggttccgcgcacatttccccgaaaagtgccacctgacgtctaagaaaccattattatcatgacattaacctataaaaataggcgtatcacgaggccctttcgtctcgcgcgtttcggtgatgacggtgaaaacctctgacacatgcagctcccggagacggtcacagcttgtctgtaagcggatgccgggagcagacaagcccgtcagggcgcgtcagcgggtgttggcgggtgtcggggctggcttaactatgcggcatcagagcagattgtactgagagtgcaccattcgacgctctcccttatgcgactcctgcattaggaagcagcccagtagtaggttgaggccgttgagcaccgccgccgcaaggaatggtctggcttatcgaaattaatacgactcactatagggagacc

SEQ ID NO: 194 - DNA, 20 bp, synthetic construct
  source 1..20: mol_type = other DNA
agggatgagtcatgtggcag

SEQ ID NO: 195 - protein, 121 aa, synthetic construct
QVKLQESGGGLVQPGGSLRLSCAASGFTFDSYAMSWVRQAPGKGLEWVSYITSSSSTIYYVDSVKGRFTISRDNAKNSLYLQMNSLRDEDTAVYYCARLRNSEGYWYFDLWGRGTLVTVSS

SEQ ID NO: 196 - protein, 109 aa, synthetic construct
QSALTQDPAVSVALGQTVRITCQGDSLRSYFASWYQQKPGQAPLLVMYGQNIRPSGIPDRFSGSSSGNSASLTITGAQAEDEADYYCNSRDSSYNHWVFGGGTKLTVLG

SEQ ID NO: 197 - DNA, 6677 bp, synthetic construct
  source 1..6677: mol_type = other DNA
ggaattcgagctcgccccgttacataacttacggtaaatggcccgcctggctgaccgcccaacgacccccgcccattgacgtcaataatgacgtatgttcccatagtaacgccaatagggactttccattgacgtcaatgggtggagtatttacggtaaactgcccacttggcagtacatcaagtgtatcatatgccaagtacgccccctattgacgtcaatgacggtaaatggcccgcctggcattatgcccagtacatgaccttatgggactttcctacttggcagtacatctacgtattagtcatcgctattaccatggtgatgcggttttggcagtacatcaatgggcgtggatagcggtttgactcacggggatttccaagtctccaccccattgacgtcaatgggagtttgttttggcaccaaaatcaacgggactttccaaaatgtcgtaacaactccgccccattgacgcaaatgggcggtaggcgtgtacggtgggaggtctatataagcagagctcgtttagtgaaccgtcagatcgcctggagacgccatccacgctgttttgacctccatagaagacaccgggaccgatccagcctccgggggatcgatccccccgatcctgagaacttcagggtgagtttggggacccttgattgttctttctttttcgctattgtaaaattcatgttatatggagggggcaaagttttcagggtgttgtttagaatgggaagatgtcccttgtatcaccatggaccctcatgataattttgtttctttcactttctactctgttgacaaccattgtctcctcttattttcttttcattttctgtaactttttcgttaaactttagcttgcatttgtaacgaatttttaaattcacttttgtttatttgtcagattgtaagtactttctctaatcacttttttttcaaggcaatcagggtatattatattgtacttcagcacagttttagagaacaattgttataattaaatgataaggtagaatatttctgcatataaattctggctggcgtggaaatattcttattggtagaaacaactacatcctggtcatcatcctgcctttctctttatggttacaatgatatacactgtttgagatgaggataaaatactctgagtccaaaccgggcccctctgctaaccatgttcatgccttcttctttttcctacagctcctgggcaacgtgctggttattgtgctgtctcatcattttggcaaagaattgtaatacgactcactatagggcgaattcggatcccccggtagttaattaatacgcgtcactatgaagtgccttttgtacttagcctttttattcattggggtgaattgcaaggagggcatctgccgcaaccgcgtgaccaacaacgtgaaggacgtgaccaagctggtggccaacctgcccaaggactacatgatcaccctgaagtacgtgcccggcatggacgtgctgcccagccactgctggatcagcgagatggtggtgcagctgtcggacagcctgaccgacctgctggacaagttcagcaacatcagcgagggcctgagcaactacagcatcatcgacaagctggtgaacatcgtggacgacctggtggagtgcgtgaaggagaacagcagcaaggacctgaagaagagcttcaagagccccgagccccgcctgttcacccccgaggagttcttccgcatcttcaaccgcagcatcgacgccttcaaggacttcgtggtggccagcgagaccagcgactgcgtggtgagcagcaccctgagccccgagaaggacagccgcgtgagcgtgaccaagcccttcatgctgccccccgtggccgccgcggccgcaagtggtggttctggaggcggtggaagtggtggcggaggtagtgggcccaagttcaccatagtttttccacacaaccaaaaaggaaactggaaaaatgttccttctaattaccattattgcccgtcaagctcagatttaaattggcataatgacttaataggcacagccttacaagtcaaaatgccccagagtcacaaggctattcaagcagacggttggatgtgtcatgcttccaaatgggtcactacttgtgatttccgctggtatggaccgaagtatataacacattccatccgatccttcactccatctgtagaacaatgcaaggaaagcattgaacaaacgaaacaaggaacttggctgaatccaggcttccctcctcaaagttgtggatatgcaactgtgacggatgccgaagcagtgattgtccaggtgactcctcaccatgtgctggttgatgaatacacaggagaatgggttgattcacagttcatcaacggaaaatgcagcaattacatatgccccactgtccataactctacaacctggcattctgactataaggtcaaagggctatgtgattctaacctcatttccatggacatcaccttcttctcagaggacggagagctatcatccctgggaaaggagggcacagggttcagaagtaactactttgcttatgaaactggaggcaaggcctgcaaaatgcaatactgcaagcattggggagtcagactcccatcaggtgtctggttcgagatggctgataaggatctctttgctgcagccagattccctgaatgcccagaagggtcaagtatctctgctccatctcagacctcagtggatgtaagtctaattcaggacgttgagaggatcttggattattccctctgccaagaaacctggagcaaaatcagagcgggtcttccaatctctccagtggatctcagctatcttgctcctaaaaacccaggaaccggtcctgctttcaccataatcaatggtaccctaaaatactttgagaccagatacatcagagtcgatattgctgctccaatcctctcaagaatggtcggaatgatcagtggaactaccacagaacaggaactgtgggatgactgggcaccatatgaagacgtggaaattggacccaatggagttctgaggaccagttcaggatataagtttcctttatacatgattggacatggtatgttggactccgatcttcatcttagctcaaaggctcaggtgttcgaacatcctcacattcaagacgctgcttcgcaacttcctgatgatgagagtttattttttggtgatactgggctatccaaaaatccaatcgagcttgtagaaggttggttcagtagttggaaaagctctattgcctcttttttctttatcatagggttaatcattggactattcttggttctccgagttggtatccatctttgcattaaattaaagcacaccaagaaaagacagatttatacagacatagagatgaaccgacttggaaagtaactcaaatcctgctaggtatgaaaaaaactaacagatatcacgcctaggactagtgtgaaatagacatcagaattaagaaaaacgtagggtccaagtggttccccgttatggactcgctatctgtcaaccagatcttataccctgaagttcacctagatagcccgatagttaccaataagatagtagccatcctggagtatgctcgactgtttaaacctgcaggcatgcaagctgatctttttccctctgccaaaaattatggggacatcatgaagccccttgagcatctgacttctggctaataaaggaaatttattttcattgcaatagtgtgttggaattttttgtgtctctcactcggaaggacatatgggagggcaaatcatttaaaacatcagaatgagtatttggtttagagtttggcaacatatgcccatatgctggctgccatgaacaaaggttggctataaagaggtcatcagtatatgaaacagccccctgctgtccattccttattccatagaaaagccttgacttgaggttagattttttttatattttgttttgtgttatttttttctttaacatccctaaaattttccttacatgttttactagccagatttttcctcctctcctgactactcccagtcatagctgtccctcttctcttatggagatccctcgaggagctttttgcaaaagcccaggcctccaaaaaagcctcttcactacttctggaatagctcagaagccgaggcggcctcggcctctgcataaataaaaaaaattagtcagccatggggcggagaatgggcggaactgggcggagttaggggcgggatgggcggagttaggggcgggactatggttgctgactaattgctgcattaatgaatcggccaacgcgcggggagaggcggtttgcgtattgggcgctcttccgcttcctcgctcactgactcgctgcgctcggtcgttcggctgcggcgagcggtatcagctcactcaaaggcggtaatacggttatccacagaatcaggggataacgcaggaaagaacatgtgagcaaaaggccagcaaaaggccaggaaccgtaaaaaggccgcgttgctggcgtttttccataggctccgcccccctgacgagcatcacaaaaatcgacgctcaagtcagaggtggcgaaacccgacaggactataaagataccaggcgtttccccctggaagctccctcgtgcgctctcctgttccgaccctgccgcttaccggatacctgtccgcctttctcccttcgggaagcgtggcgctttctcatagctcacgctgtaggtatctcagttcggtgtaggtcgttcgctccaagctgggctgtgtgcacgaaccccccgttcagcccgaccgctgcgccttatccggtaactatcgtcttgagtccaacccggtaagacacgacttatcgccactggcagcagccactggtaacaggattagcagagcgaggtatgtaggcggtgctacagagttcttgaagtggtggcctaactacggctacactagaagaacagtatttggtatctgcgctctgctgaagccagttaccttcggaaaaagagttggtagctcttgatccggcaaacaaaccaccgctggtagcggtggtttttttgtttgcaagcagcagattacgcgcagaaaaaaaggatctcaagaagatcctttgatcttttctacggggtctgacgctcagtggaacgaaaactcacgttaagggattttggtcatgagattatcaaaaaggatcttcacctagatccttttaaattaaaaatgaagttttaaatcaatctaaagtatatatgagtaaacttggtctgacagttaccaatgcttaatcagtgaggcacctatctcagcgatctgtctatttcgttcatccatagttgcctgactccccgtcgtgtagataactacgatacgggagggcttaccatctggccccagtgctgcaatgataccgcgagacccacgctcaccggctccagatttatcagcaataaaccagccagccggaagggccgagcgcagaagtggtcctgcaactttatccgcctccatccagtctattaattgttgccgggaagctagagtaagtagttcgccagttaatagtttgcgcaacgttgttgccattgctacaggcatcgtggtgtcacgctcgtcgtttggtatggcttcattcagctccggttcccaacgatcaaggcgagttacatgatcccccatgttgtgcaaaaaagcggttagctccttcggtcctccgatcgttgtcagaagtaagttggccgcagtgttatcactcatggttatggcagcactgcataattctcttactgtcatgccatccgtaagatgcttttctgtgactggtgagtactcaaccaagtcattctgagaatagtgtatgcggcgaccgagttgctcttgcccggcgtcaatacgggataataccgcgccacatagcagaactttaaaagtgctcatcattggaaaacgttcttcggggcgaaaactctcaaggatcttaccgctgttgagatccagttcgatgtaacccactcgtgcacccaactgatcttcagcatcttttactttcaccagcgtttctgggtgagcaaaaacaggaaggcaaaatgccgcaaaaaagggaataagggcgacacggaaatgttgaatactcatactcttcctttttcaatattattgaagcatttatcagggttattgtctcatgagcggatacatatttgaatgtatttagaaaaataaacaaataggggttccgcgcacatttccccgaaaagtgccacctgacgtctaagaaaccattattatcatgacattaacctataaaaataggcgtatcacgaggccctttcgtctcgcgcgtttcggtgatgacggtgaaaacctctgacacatgcagctcccggagacggtcacagcttgtctgtaagcggatgccgggagcagacaagcccgtcagggcgcgtcagcgggtgttggcgggtgtcggggctggcttaactatgcggcatcagagcagattgtactgagagtgcaccattcgacgctctcccttatgcgactcctgcattaggaagcagcccagtagtaggttgaggccgttgagcaccgccgccgcaaggaatggtctggcttatcgaaattaatacgactcactatagggagacc

SEQ ID NO: 198 - DNA, 6605 bp, synthetic construct
  source 1..6605: mol_type = other DNA
ggaattcgagctcgccccgttacataacttacggtaaatggcccgcctggctgaccgcccaacgacccccgcccattgacgtcaataatgacgtatgttcccatagtaacgccaatagggactttccattgacgtcaatgggtggagtatttacggtaaactgcccacttggcagtacatcaagtgtatcatatgccaagtacgccccctattgacgtcaatgacggtaaatggcccgcctggcattatgcccagtacatgaccttatgggactttcctacttggcagtacatctacgtattagtcatcgctattaccatggtgatgcggttttggcagtacatcaatgggcgtggatagcggtttgactcacggggatttccaagtctccaccccattgacgtcaatgggagtttgttttggcaccaaaatcaacgggactttccaaaatgtcgtaacaactccgccccattgacgcaaatgggcggtaggcgtgtacggtgggaggtctatataagcagagctcgtttagtgaaccgtcagatcgcctggagacgccatccacgctgttttgacctccatagaagacaccgggaccgatccagcctccgggggatcgatccccccgatcctgagaacttcagggtgagtttggggacccttgattgttctttctttttcgctattgtaaaattcatgttatatggagggggcaaagttttcagggtgttgtttagaatgggaagatgtcccttgtatcaccatggaccctcatgataattttgtttctttcactttctactctgttgacaaccattgtctcctcttattttcttttcattttctgtaactttttcgttaaactttagcttgcatttgtaacgaatttttaaattcacttttgtttatttgtcagattgtaagtactttctctaatcacttttttttcaaggcaatcagggtatattatattgtacttcagcacagttttagagaacaattgttataattaaatgataaggtagaatatttctgcatataaattctggctggcgtggaaatattcttattggtagaaacaactacatcctggtcatcatcctgcctttctctttatggttacaatgatatacactgtttgagatgaggataaaatactctgagtccaaaccgggcccctctgctaaccatgttcatgccttcttctttttcctacagctcctgggcaacgtgctggttattgtgctgtctcatcattttggcaaagaattgtaatacgactcactatagggcgaattcggatcccccggtagttaattaatacgcgtcactatgaagtgccttttgtacttagcctttttattcattggggtgaattgcaagaaggagatctgcggcgatcctgtgaccgataacgtgaaagacattaccaagctggtggccaacctgccaaatgactacatgattaccctgaactacgtggccggcatggacgtgctgccctcccattgttggctcagggatatggtgattcagctgtccctgagcctcaccacactgctcgacaagttcagcaacatcagcgagggactgagcaactacagcatcattcacaagctggggattatcgttgatgacctgttcttctgcatggaggagaacgcccctaagaacatcaaggagttcccaaagaggcctgagacccggagcttcacacctgaggagttcttcagcatcttcaacaggtccatcgacgcctttaaggacttcatggtggcttccgataccagtgactgtgtgctgtccgcggccgcaagtggtggttctggaggcggtggaagtggtggcggaggtagtgggcccaagttcacgatcgtttttccacacaaccaaaaaggaaactggaaaaatgttccttctaattaccattattgcccgtcaagctcagatttaaattggcataatgacttaataggcacagccttacaagtcaaaatgccccagagtcacaaggctattcaagcagacggttggatgtgtcatgcttccaaatgggtcactacttgtgatttccgctggtatggaccgaagtatataacacattccatccgatccttcactccatctgtagaacaatgcaaggaaagcattgaacaaacgaaacaaggaacttggctgaatccaggcttccctcctcaaagttgtggatatgcaactgtgacggatgccgaagcagtgattgtccaggtgactcctcaccatgtgctggttgatgaatacacaggagaatgggttgattcacagttcatcaacggaaaatgcagcaattacatatgccccactgtccataactctacaacctggcattctgactataaggtcaaagggctatgtgattctaacctcatttccatggacatcaccttcttctcagaggacggagagctatcatccctgggaaaggagggcacagggttcagaagtaaccaatttgcttatgaaactggaggcaaggcctgcaaaatgcaatactgcaagcattggggagtcagactcccatcaggtgtctggttcgagatggctgataaggatctctttgctgcagccagattccctgaatgcccagaagggtcaagtatctctgctccatctcagacctcagtggatgtaagtctaattcaggacgttgagaggatcttggattattccctctgccaagaaacctggagcaaaatcagagcgggtcttccaatctctccagtggatctcagctatcttgctcctaaaaacccaggaaccggtcctgctttcaccataatcaatggtaccctaaaatactttgagaccagatacatcagagtcgatattgctgctccaatcctctcaagaatggtcggaatgatctccggaactaccacagaacaggaactgtgggatgactgggcgccatatgaagacgtggaaattggacccaatggagttctgaggaccagttcaggatataagtttcctttatacatgattggacatggtatgttggactccgatcttcatcttagctcaaaggctcaggtgttcgaacatcctcacattcaagacgctgcttcgcaacttcctgatgatgagagtttattttttggtgatactgggctatccaaaaatccaatcgagcttgtagaaggttggttcagtagttggaaaagctctattgcctcttttttctttatcatagggttaatcattggactattcttggttctccgagttggtatccatctttgcattaaattaaagcacaccaagaaaagacagatttatacagacatagagatgaaccgacttggaaagtaactcaaatcctgctaggtatgaaaaaaactaacagatatcacgcctaggactagtgtgaaatagacatcagaattaagaaaaacgtagggtccaagtggttccccgttatggactcgctatctgtcaaccagatcttataccctgaagttcacctagatagcccgatagttaccaataagatagtagccatcctggagtatgctcgactgtttaaacctgcaggcatgcaagctgatctttttccctctgccaaaaattatggggacatcatgaagccccttgagcatctgacttctggctaataaaggaaatttattttcattgcaatagtgtgttggaattttttgtgtctctcactcggaaggacatatgggagggcaaatcatttaaaacatcagaatgagtatttggtttagagtttggcaacatatgcccatatgctggctgccatgaacaaaggttggctataaagaggtcatcagtatatgaaacagccccctgctgtccattccttattccatagaaaagccttgacttgaggttagattttttttatattttgttttgtgttatttttttctttaacatccctaaaattttccttacatgttttactagccagatttttcctcctctcctgactactcccagtcatagctgtccctcttctcttatggagatccctcgaggagctttttgcaaaagcctaggcctccaaaaaagcctcttcactacttctggaatagctcagaagccgaggcggcctcggcctctgcataaataaaaaaaattagtcagccatggggcggagaatgggcggaactgggcggagttaggggcgggatgggcggagttaggggcgggactatggttgctgactaattgctgcattaatgaatcggccaacgcgcggggagaggcggtttgcgtattgggcgctcttccgcttcctcgctcactgactcgctgcgctcggtcgttcggctgcggcgagcggtatcagctcactcaaaggcggtaatacggttatccacagaatcaggggataacgcaggaaagaacatgtgagcaaaaggccagcaaaaggccaggaaccgtaaaaaggccgcgttgctggcgtttttccataggctccgcccccctgacgagcatcacaaaaatcgacgctcaagtcagaggtggcgaaacccgacaggactataaagataccaggcgtttccccctggaagctccctcgtgcgctctcctgttccgaccctgccgcttaccggatacctgtccgcctttctcccttcgggaagcgtggcgctttctcatagctcacgctgtaggtatctcagttcggtgtaggtcgttcgctccaagctgggctgtgtgcacgaaccccccgttcagcccgaccgctgcgccttatccggtaactatcgtcttgagtccaacccggtaagacacgacttatcgccactggcagcagccactggtaacaggattagcagagcgaggtatgtaggcggtgctacagagttcttgaagtggtggcctaactacggctacactagaagaacagtatttggtatctgcgctctgctgaagccagttaccttcggaaaaagagttggtagctcttgatccggcaaacaaaccaccgctggtagcggtggtttttttgtttgcaagcagcagattacgcgcagaaaaaaaggatctcaagaagatcctttgatcttttctacggggtctgacgctcagtggaacgaaaactcacgttaagggattttggtcatgagattatcaaaaaggatcttcacctagatccttttaaattaaaaatgaagttttaaatcaatctaaagtatatatgagtaaacttggtctgacagttaccaatgcttaatcagtgaggcacctatctcagcgatctgtctatttcgttcatccatagttgcctgactccccgtcgtgtagataactacgatacgggagggcttaccatctggccccagtgctgcaatgataccgcgagacccacgctcaccggctccagatttatcagcaataaaccagccagccggaagggccgagcgcagaagtggtcctgcaactttatccgcctccatccagtctattaattgttgccgggaagctagagtaagtagttcgccagttaatagtttgcgcaacgttgttgccattgctacaggcatcgtggtgtcacgctcgtcgtttggtatggcttcattcagctccggttcccaacgatcaaggcgagttacatgatcccccatgttgtgcaaaaaagcggttagctccttcggtcctccgatagttgtcagaagtaagttggccgcagtgttatcactcatggttatggcagcactgcataattctcttactgtcatgccatccgtaagatgcttttctgtgactggtgagtactcaaccaagtcattctgagaatagtgtatgcggcgaccgagttgctcttgcccggcgtcaatacgggataataccgcgccacatagcagaactttaaaagtgctcatcattggaaaacgttcttcggggcgaaaactctcaaggatcttaccgctgttgagatccagttcgatgtaacccactcgtgcacccaactgatcttcagcatcttttactttcaccagcgtttctgggtgagcaaaaacaggaaggcaaaatgccgcaaaaaagggaataagggcgacacggaaatgttgaatactcatactcttcctttttcaatattattgaagcatttatcagggttattgtctcatgagcggatacatatttgaatgtatttagaaaaataaacaaataggggttccgcgcacatttccccgaaaagtgccacctgacgtctaagaaaccattattatcatgacattaacctataaaaataggcgtatcacgaggccctttcgtctcgcgcgtttcggtgatgacggtgaaaacctctgacacatgcagctcccggagacggtcacagcttgtctgtaagcggatgccgggagcagacaagcccgtcagggcgcgtcagcgggtgttggcgggtgtcggggctggcttaactatgcggcatcagagcagattgtactgagagtgcaccattcgacgctctcccttatgcgactcctgcattaggaagcagcccagtagtaggttgaggccgttgagcaccgccgccgcaaggaatggtctggcttatcgaaattaatacgactcactatagggagacc

SEQ ID NO: 199 - DNA, 6605 bp, synthetic construct
  source 1..6605: mol_type = other DNA
ggaattcgagctcgccccgttacataacttacggtaaatggcccgcctggctgaccgcccaacgacccccgcccattgacgtcaataatgacgtatgttcccatagtaacgccaatagggactttccattgacgtcaatgggtggagtatttacggtaaactgcccacttggcagtacatcaagtgtatcatatgccaagtacgccccctattgacgtcaatgacggtaaatggcccgcctggcattatgcccagtacatgaccttatgggactttcctacttggcagtacatctacgtattagtcatcgctattaccatggtgatgcggttttggcagtacatcaatgggcgtggatagcggtttgactcacggggatttccaagtctccaccccattgacgtcaatgggagtttgttttggcaccaaaatcaacgggactttccaaaatgtcgtaacaactccgccccattgacgcaaatgggcggtaggcgtgtacggtgggaggtctatataagcagagctcgtttagtgaaccgtcagatcgcctggagacgccatccacgctgttttgacctccatagaagacaccgggaccgatccagcctccgggggatcgatccccccgatcctgagaacttcagggtgagtttggggacccttgattgttctttctttttcgctattgtaaaattcatgttatatggagggggcaaagttttcagggtgttgtttagaatgggaagatgtcccttgtatcaccatggaccctcatgataattttgtttctttcactttctactctgttgacaaccattgtctcctcttattttcttttcattttctgtaactttttcgttaaactttagcttgcatttgtaacgaatttttaaattcacttttgtttatttgtcagattgtaagtactttctctaatcacttttttttcaaggcaatcagggtatattatattgtacttcagcacagttttagagaacaattgttataattaaatgataaggtagaatatttctgcatataaattctggctggcgtggaaatattcttattggtagaaacaactacatcctggtcatcatcctgcctttctctttatggttacaatgatatacactgtttgagatgaggataaaatactctgagtccaaaccgggcccctctgctaaccatgttcatgccttcttctttttcctacagctcctgggcaacgtgctggttattgtgctgtctcatcattttggcaaagaattgtaatacgactcactatagggcgaattcggatcccccggtagttaattaatacgcgtcactatgaagtgccttttgtacttagcctttttattcattggggtgaattgcaagaaggagatctgcggcgatcctgtgaccgataacgtgaaagacattaccaagctggtggccaacctgccaaatgactacatgattaccctgaactacgtggccggcatggacgtgctgccctcccattgttggctcagggatatggtgattcagctgtccctgagcctcaccacactgctcgacaaggccagcaacatcagcgagggactgagcaactacagcatcattcacaagctggggattatcgttgatgacctgttcttctgcatggaggagaacgcccctaagaacatcaaggagttcccaaagaggcctgagacccggagcttcacacctgaggagttcttcagcatcttcaacaggtccatcgacgcctttaaggacttcatggtggcttccgataccagtgactgtgtgctgtccgcggccgcaagtggtggttctggaggcggtggaagtggtggcggaggtagtgggcccaagttcacgatcgtttttccacacaaccaaaaaggaaactggaaaaatgttccttctaattaccattattgcccgtcaagctcagatttaaattggcataatgacttaataggcacagccttacaagtcaaaatgccccagagtcacaaggctattcaagcagacggttggatgtgtcatgcttccaaatgggtcactacttgtgatttccgctggtatggaccgaagtatataacacattccatccgatccttcactccatctgtagaacaatgcaaggaaagcattgaacaaacgaaacaaggaacttggctgaatccaggcttccctcctcaaagttgtggatatgcaactgtgacggatgccgaagcagtgattgtccaggtgactcctcaccatgtgctggttgatgaatacacaggagaatgggttgattcacagttcatcaacggaaaatgcagcaattacatatgccccactgtccataactctacaacctggcattctgactataaggtcaaagggctatgtgattctaacctcatttccatggacatcaccttcttctcagaggacggagagctatcatccctgggaaaggagggcacagggttcagaagtaaccaatttgcttatgaaactggaggcaaggcctgcaaaatgcaatactgcaagcattggggagtcagactcccatcaggtgtctggttcgagatggctgataaggatctctttgctgcagccagattccctgaatgcccagaagggtcaagtatctctgctccatctcagacctcagtggatgtaagtctaattcaggacgttgagaggatcttggattattccctctgccaagaaacctggagcaaaatcagagcgggtcttccaatctctccagtggatctcagctatcttgctcctaaaaacccaggaaccggtcctgctttcaccataatcaatggtaccctaaaatactttgagaccagatacatcagagtcgatattgctgctccaatcctctcaagaatggtcggaatgatctccggaactaccacagaacaggaactgtgggatgactgggcgccatatgaagacgtggaaattggacccaatggagttctgaggaccagttcaggatataagtttcctttatacatgattggacatggtatgttggactccgatcttcatcttagctcaaaggctcaggtgttcgaacatcctcacattcaagacgctgcttcgcaacttcctgatgatgagagtttattttttggtgatactgggctatccaaaaatccaatcgagcttgtagaaggttggttcagtagttggaaaagctctattgcctcttttttctttatcatagggttaatcattggactattcttggttctccgagttggtatccatctttgcattaaattaaagcacaccaagaaaagacagatttatacagacatagagatgaaccgacttggaaagtaactcaaatcctgctaggtatgaaaaaaactaacagatatcacgcctaggactagtgtgaaatagacatcagaattaagaaaaacgtagggtccaagtggttccccgttatggactcgctatctgtcaaccagatcttataccctgaagttcacctagatagcccgatagttaccaataagatagtagccatcctggagtatgctcgactgtttaaacctgcaggcatgcaagctgatctttttccctctgccaaaaattatggggacatcatgaagccccttgagcatctgacttctggctaataaaggaaatttattttcattgcaatagtgtgttggaattttttgtgtctctcactcggaaggacatatgggagggcaaatcatttaaaacatcagaatgagtatttggtttagagtttggcaacatatgcccatatgctggctgccatgaacaaaggttggctataaagaggtcatcagtatatgaaacagccccctgctgtccattccttattccatagaaaagccttgacttgaggttagattttttttatattttgttttgtgttatttttttctttaacatccctaaaattttccttacatgttttactagccagatttttcctcctctcctgactactcccagtcatagctgtccctcttctcttatggagatccctcgaggagctttttgcaaaagcctaggcctccaaaaaagcctcttcactacttctggaatagctcagaagccgaggcggcctcggcctctgcataaataaaaaaaattagtcagccatggggcggagaatgggcggaactgggcggagttaggggcgggatgggcggagttaggggcgggactatggttgctgactaattgctgcattaatgaatcggccaacgcgcggggagaggcggtttgcgtattgggcgctcttccgcttcctcgctcactgactcgctgcgctcggtcgttcggctgcggcgagcggtatcagctcactcaaaggcggtaatacggttatccacagaatcaggggataacgcaggaaagaacatgtgagcaaaaggccagcaaaaggccaggaaccgtaaaaaggccgcgttgctggcgtttttccataggctccgcccccctgacgagcatcacaaaaatcgacgctcaagtcagaggtggcgaaacccgacaggactataaagataccaggcgtttccccctggaagctccctcgtgcgctctcctgttccgaccctgccgcttaccggatacctgtccgcctttctcccttcgggaagcgtggcgctttctcatagctcacgctgtaggtatctcagttcggtgtaggtcgttcgctccaagctgggctgtgtgcacgaaccccccgttcagcccgaccgctgcgccttatccggtaactatcgtcttgagtccaacccggtaagacacgacttatcgccactggcagcagccactggtaacaggattagcagagcgaggtatgtaggcggtgctacagagttcttgaagtggtggcctaactacggctacactagaagaacagtatttggtatctgcgctctgctgaagccagttaccttcggaaaaagagttggtagctcttgatccggcaaacaaaccaccgctggtagcggtggtttttttgtttgcaagcagcagattacgcgcagaaaaaaaggatctcaagaagatcctttgatcttttctacggggtctgacgctcagtggaacgaaaactcacgttaagggattttggtcatgagattatcaaaaaggatcttcacctagatccttttaaattaaaaatgaagttttaaatcaatctaaagtatatatgagtaaacttggtctgacagttaccaatgcttaatcagtgaggcacctatctcagcgatctgtctatttcgttcatccatagttgcctgactccccgtcgtgtagataactacgatacgggagggcttaccatctggccccagtgctgcaatgataccgcgagacccacgctcaccggctccagatttatcagcaataaaccagccagccggaagggccgagcgcagaagtggtcctgcaactttatccgcctccatccagtctattaattgttgccgggaagctagagtaagtagttcgccagttaatagtttgcgcaacgttgttgccattgctacaggcatcgtggtgtcacgctcgtcgtttggtatggcttcattcagctccggttcccaacgatcaaggcgagttacatgatcccccatgttgtgcaaaaaagcggttagctccttcggtcctccgatagttgtcagaagtaagttggccgcagtgttatcactcatggttatggcagcactgcataattctcttactgtcatgccatccgtaagatgcttttctgtgactggtgagtactcaaccaagtcattctgagaatagtgtatgcggcgaccgagttgctcttgcccggcgtcaatacgggataataccgcgccacatagcagaactttaaaagtgctcatcattggaaaacgttcttcggggcgaaaactctcaaggatcttaccgctgttgagatccagttcgatgtaacccactcgtgcacccaactgatcttcagcatcttttactttcaccagcgtttctgggtgagcaaaaacaggaaggcaaaatgccgcaaaaaagggaataagggcgacacggaaatgttgaatactcatactcttcctttttcaatattattgaagcatttatcagggttattgtctcatgagcggatacatatttgaatgtatttagaaaaataaacaaataggggttccgcgcacatttccccgaaaagtgccacctgacgtctaagaaaccattattatcatgacattaacctataaaaataggcgtatcacgaggccctttcgtctcgcgcgtttcggtgatgacggtgaaaacctctgacacatgcagctcccggagacggtcacagcttgtctgtaagcggatgccgggagcagacaagcccgtcagggcgcgtcagcgggtgttggcgggtgtcggggctggcttaactatgcggcatcagagcagattgtactgagagtgcaccattcgacgctctcccttatgcgactcctgcattaggaagcagcccagtagtaggttgaggccgttgagcaccgccgccgcaaggaatggtctggcttatcgaaattaatacgactcactatagggagacc

SEQ ID NO: 200 - DNA, 6605 bp, synthetic construct
  source 1..6605: mol_type = other DNA
ggaattcgagctcgccccgttacataacttacggtaaatggcccgcctggctgaccgcccaacgacccccgcccattgacgtcaataatgacgtatgttcccatagtaacgccaatagggactttccattgacgtcaatgggtggagtatttacggtaaactgcccacttggcagtacatcaagtgtatcatatgccaagtacgccccctattgacgtcaatgacggtaaatggcccgcctggcattatgcccagtacatgaccttatgggactttcctacttggcagtacatctacgtattagtcatcgctattaccatggtgatgcggttttggcagtacatcaatgggcgtggatagcggtttgactcacggggatttccaagtctccaccccattgacgtcaatgggagtttgttttggcaccaaaatcaacgggactttccaaaatgtcgtaacaactccgccccattgacgcaaatgggcggtaggcgtgtacggtgggaggtctatataagcagagctcgtttagtgaaccgtcagatcgcctggagacgccatccacgctgttttgacctccatagaagacaccgggaccgatccagcctccgggggatcgatccccccgatcctgagaacttcagggtgagtttggggacccttgattgttctttctttttcgctattgtaaaattcatgttatatggagggggcaaagttttcagggtgttgtttagaatgggaagatgtcccttgtatcaccatggaccctcatgataattttgtttctttcactttctactctgttgacaaccattgtctcctcttattttcttttcattttctgtaactttttcgttaaactttagcttgcatttgtaacgaatttttaaattcacttttgtttatttgtcagattgtaagtactttctctaatcacttttttttcaaggcaatcagggtatattatattgtacttcagcacagttttagagaacaattgttataattaaatgataaggtagaatatttctgcatataaattctggctggcgtggaaatattcttattggtagaaacaactacatcctggtcatcatcctgcctttctctttatggttacaatgatatacactgtttgagatgaggataaaatactctgagtccaaaccgggcccctctgctaaccatgttcatgccttcttctttttcctacagctcctgggcaacgtgctggttattgtgctgtctcatcattttggcaaagaattgtaatacgactcactatagggcgaattcggatcccccggtagttaattaatacgcgtcactatgaagtgccttttgtacttagcctttttattcattggggtgaattgcaagaaggagatctgcggcaatcctgtgaccgataacgtgaaagacattaccaagctggtggccaacctgccaaatgactacatgattaccctgaactacgtggccggcatggacgtgctgccctcccattgttggctcagggatatggtgattcagctgtccctgagcctcaccacactgctcgacaaggccagcaacatcagcgagggactgagcaactacagcatcattgacaagctggggaagatcgttgatgacctggtgctgtgcatggaggagaacgcccctaagaacatcaaggagagcccaaagaggcctgagacccggagcttcacacctgaggagttcttcagcatcttcaacaggtccatcgacgcctttaaggacttcatggtggcttccgataccagtgactgtgtgctgtccgcggccgcaagtggtggttctggaggcggtggaagtggtggcggaggtagtgggcccaagttcacgatcgtttttccacacaaccaaaaaggaaactggaaaaatgttccttctaattaccattattgcccgtcaagctcagatttaaattggcataatgacttaataggcacagccttacaagtcaaaatgccccagagtcacaaggctattcaagcagacggttggatgtgtcatgcttccaaatgggtcactacttgtgatttccgctggtatggaccgaagtatataacacattccatccgatccttcactccatctgtagaacaatgcaaggaaagcattgaacaaacgaaacaaggaacttggctgaatccaggcttccctcctcaaagttgtggatatgcaactgtgacggatgccgaagcagtgattgtccaggtgactcctcaccatgtgctggttgatgaatacacaggagaatgggttgattcacagttcatcaacggaaaatgcagcaattacatatgccccactgtccataactctacaacctggcattctgactataaggtcaaagggctatgtgattctaacctcatttccatggacatcaccttcttctcagaggacggagagctatcatccctgggaaaggagggcacagggttcagaagtaaccaatttgcttatgaaactggaggcaaggcctgcaaaatgcaatactgcaagcattggggagtcagactcccatcaggtgtctggttcgagatggctgataaggatctctttgctgcagccagattccctgaatgcccagaagggtcaagtatctctgctccatctcagacctcagtggatgtaagtctaattcaggacgttgagaggatcttggattattccctctgccaagaaacctggagcaaaatcagagcgggtcttccaatctctccagtggatctcagctatcttgctcctaaaaacccaggaaccggtcctgctttcaccataatcaatggtaccctaaaatactttgagaccagatacatcagagtcgatattgctgctccaatcctctcaagaatggtcggaatgatctccggaactaccacagaacaggaactgtgggatgactgggcgccatatgaagacgtggaaattggacccaatggagttctgaggaccagttcaggatataagtttcctttatacatgattggacatggtatgttggactccgatcttcatcttagctcaaaggctcaggtgttcgaacatcctcacattcaagacgctgcttcgcaacttcctgatgatgagagtttattttttggtgatactgggctatccaaaaatccaatcgagcttgtagaaggttggttcagtagttggaaaagctctattgcctcttttttctttatcatagggttaatcattggactattcttggttctccgagttggtatccatctttgcattaaattaaagcacaccaagaaaagacagatttatacagacatagagatgaaccgacttggaaagtaactcaaatcctgctaggtatgaaaaaaactaacagatatcacgcctaggactagtgtgaaatagacatcagaattaagaaaaacgtagggtccaagtggttccccgttatggactcgctatctgtcaaccagatcttataccctgaagttcacctagatagcccgatagttaccaataagatagtagccatcctggagtatgctcgactgtttaaacctgcaggcatgcaagctgatctttttccctctgccaaaaattatggggacatcatgaagccccttgagcatctgacttctggctaataaaggaaatttattttcattgcaatagtgtgttggaattttttgtgtctctcactcggaaggacatatgggagggcaaatcatttaaaacatcagaatgagtatttggtttagagtttggcaacatatgcccatatgctggctgccatgaacaaaggttggctataaagaggtcatcagtatatgaaacagccccctgctgtccattccttattccatagaaaagccttgacttgaggttagattttttttatattttgttttgtgttatttttttctttaacatccctaaaattttccttacatgttttactagccagatttttcctcctctcctgactactcccagtcatagctgtccctcttctcttatggagatccctcgaggagctttttgcaaaagcctaggcctccaaaaaagcctcttcactacttctggaatagctcagaagccgaggcggcctcggcctctgcataaataaaaaaaattagtcagccatggggcggagaatgggcggaactgggcggagttaggggcgggatgggcggagttaggggcgggactatggttgctgactaattgctgcattaatgaatcggccaacgcgcggggagaggcggtttgcgtattgggcgctcttccgcttcctcgctcactgactcgctgcgctcggtcgttcggctgcggcgagcggtatcagctcactcaaaggcggtaatacggttatccacagaatcaggggataacgcaggaaagaacatgtgagcaaaaggccagcaaaaggccaggaaccgtaaaaaggccgcgttgctggcgtttttccataggctccgcccccctgacgagcatcacaaaaatcgacgctcaagtcagaggtggcgaaacccgacaggactataaagataccaggcgtttccccctggaagctccctcgtgcgctctcctgttccgaccctgccgcttaccggatacctgtccgcctttctcccttcgggaagcgtggcgctttctcatagctcacgctgtaggtatctcagttcggtgtaggtcgttcgctccaagctgggctgtgtgcacgaaccccccgttcagcccgaccgctgcgccttatccggtaactatcgtcttgagtccaacccggtaagacacgacttatcgccactggcagcagccactggtaacaggattagcagagcgaggtatgtaggcggtgctacagagttcttgaagtggtggcctaactacggctacactagaagaacagtatttggtatctgcgctctgctgaagccagttaccttcggaaaaagagttggtagctcttgatccggcaaacaaaccaccgctggtagcggtggtttttttgtttgcaagcagcagattacgcgcagaaaaaaaggatctcaagaagatcctttgatcttttctacggggtctgacgctcagtggaacgaaaactcacgttaagggattttggtcatgagattatcaaaaaggatcttcacctagatccttttaaattaaaaatgaagttttaaatcaatctaaagtatatatgagtaaacttggtctgacagttaccaatgcttaatcagtgaggcacctatctcagcgatctgtctatttcgttcatccatagttgcctgactccccgtcgtgtagataactacgatacgggagggcttaccatctggccccagtgctgcaatgataccgcgagacccacgctcaccggctccagatttatcagcaataaaccagccagccggaagggccgagcgcagaagtggtcctgcaactttatccgcctccatccagtctattaattgttgccgggaagctagagtaagtagttcgccagttaatagtttgcgcaacgttgttgccattgctacaggcatcgtggtgtcacgctcgtcgtttggtatggcttcattcagctccggttcccaacgatcaaggcgagttacatgatcccccatgttgtgcaaaaaagcggttagctccttcggtcctccgatagttgtcagaagtaagttggccgcagtgttatcactcatggttatggcagcactgcataattctcttactgtcatgccatccgtaagatgcttttctgtgactggtgagtactcaaccaagtcattctgagaatagtgtatgcggcgaccgagttgctcttgcccggcgtcaatacgggataataccgcgccacatagcagaactttaaaagtgctcatcattggaaaacgttcttcggggcgaaaactctcaaggatcttaccgctgttgagatccagttcgatgtaacccactcgtgcacccaactgatcttcagcatcttttactttcaccagcgtttctgggtgagcaaaaacaggaaggcaaaatgccgcaaaaaagggaataagggcgacacggaaatgttgaatactcatactcttcctttttcaatattattgaagcatttatcagggttattgtctcatgagcggatacatatttgaatgtatttagaaaaataaacaaataggggttccgcgcacatttccccgaaaagtgccacctgacgtctaagaaaccattattatcatgacattaacctataaaaataggcgtatcacgaggccctttcgtctcgcgcgtttcggtgatgacggtgaaaacctctgacacatgcagctcccggagacggtcacagcttgtctgtaagcggatgccgggagcagacaagcccgtcagggcgcgtcagcgggtgttggcgggtgtcggggctggcttaactatgcggcatcagagcagattgtactgagagtgcaccattcgacgctctcccttatgcgactcctgcattaggaagcagcccagtagtaggttgaggccgttgagcaccgccgccgcaaggaatggtctggcttatcgaaattaatacgactcactatagggagacc

SEQ ID NO: 201 - DNA, 6605 bp, synthetic construct
  source 1..6605: mol_type = other DNA
ggaattcgagctcgccccgttacataacttacggtaaatggcccgcctggctgaccgcccaacgacccccgcccattgacgtcaataatgacgtatgttcccatagtaacgccaatagggactttccattgacgtcaatgggtggagtatttacggtaaactgcccacttggcagtacatcaagtgtatcatatgccaagtacgccccctattgacgtcaatgacggtaaatggcccgcctggcattatgcccagtacatgaccttatgggactttcctacttggcagtacatctacgtattagtcatcgctattaccatggtgatgcggttttggcagtacatcaatgggcgtggatagcggtttgactcacggggatttccaagtctccaccccattgacgtcaatgggagtttgttttggcaccaaaatcaacgggactttccaaaatgtcgtaacaactccgccccattgacgcaaatgggcggtaggcgtgtacggtgggaggtctatataagcagagctcgtttagtgaaccgtcagatcgcctggagacgccatccacgctgttttgacctccatagaagacaccgggaccgatccagcctccgggggatcgatccccccgatcctgagaacttcagggtgagtttggggacccttgattgttctttctttttcgctattgtaaaattcatgttatatggagggggcaaagttttcagggtgttgtttagaatgggaagatgtcccttgtatcaccatggaccctcatgataattttgtttctttcactttctactctgttgacaaccattgtctcctcttattttcttttcattttctgtaactttttcgttaaactttagcttgcatttgtaacgaatttttaaattcacttttgtttatttgtcagattgtaagtactttctctaatcacttttttttcaaggcaatcagggtatattatattgtacttcagcacagttttagagaacaattgttataattaaatgataaggtagaatatttctgcatataaattctggctggcgtggaaatattcttattggtagaaacaactacatcctggtcatcatcctgcctttctctttatggttacaatgatatacactgtttgagatgaggataaaatactctgagtccaaaccgggcccctctgctaaccatgttcatgccttcttctttttcctacagctcctgggcaacgtgctggttattgtgctgtctcatcattttggcaaagaattgtaatacgactcactatagggcgaattcggatcccccggtagttaattaatacgcgtcactatgaagtgccttttgtacttagcctttttattcattggggtgaattgcaagaaggagatctgcggcaatcctgtgaccgataacgtgaaagacattaccaagctggtggccaacctgccaaatgactacatgattaccctgaactacgtggccggcatggacgtgctgccctcccattgttggctcagggatatggtgattcagctgtccctgagcctcaccacactgctcgacaagttcagcaacatcagcgagggactgagcaactacagcatcattgacaagctggggaagatcgttgatgacctggtgctgtgcatggaggagaacgcccctaagaacatcaaggagagcccaaagaggcctgagacccggagcttcacacctgaggagttcttcagcatcttcaacaggtccatcgacgcctttaaggacttcatggtggcttccgataccagtgactgtgtgctgtccgcggccgcaagtggtggttctggaggcggtggaagtggtggcggaggtagtgggcccaagttcacgatcgtttttccacacaaccaaaaaggaaactggaaaaatgttccttctaattaccattattgcccgtcaagctcagatttaaattggcataatgacttaataggcacagccttacaagtcaaaatgccccagagtcacaaggctattcaagcagacggttggatgtgtcatgcttccaaatgggtcactacttgtgatttccgctggtatggaccgaagtatataacacattccatccgatccttcactccatctgtagaacaatgcaaggaaagcattgaacaaacgaaacaaggaacttggctgaatccaggcttccctcctcaaagttgtggatatgcaactgtgacggatgccgaagcagtgattgtccaggtgactcctcaccatgtgctggttgatgaatacacaggagaatgggttgattcacagttcatcaacggaaaatgcagcaattacatatgccccactgtccataactctacaacctggcattctgactataaggtcaaagggctatgtgattctaacctcatttccatggacatcaccttcttctcagaggacggagagctatcatccctgggaaaggagggcacagggttcagaagtaaccaatttgcttatgaaactggaggcaaggcctgcaaaatgcaatactgcaagcattggggagtcagactcccatcaggtgtctggttcgagatggctgataaggatctctttgctgcagccagattccctgaatgcccagaagggtcaagtatctctgctccatctcagacctcagtggatgtaagtctaattcaggacgttgagaggatcttggattattccctctgccaagaaacctggagcaaaatcagagcgggtcttccaatctctccagtggatctcagctatcttgctcctaaaaacccaggaaccggtcctgctttcaccataatcaatggtaccctaaaatactttgagaccagatacatcagagtcgatattgctgctccaatcctctcaagaatggtcggaatgatctccggaactaccacagaacaggaactgtgggatgactgggcgccatatgaagacgtggaaattggacccaatggagttctgaggaccagttcaggatataagtttcctttatacatgattggacatggtatgttggactccgatcttcatcttagctcaaaggctcaggtgttcgaacatcctcacattcaagacgctgcttcgcaacttcctgatgatgagagtttattttttggtgatactgggctatccaaaaatccaatcgagcttgtagaaggttggttcagtagttggaaaagctctattgcctcttttttctttatcatagggttaatcattggactattcttggttctccgagttggtatccatctttgcattaaattaaagcacaccaagaaaagacagatttatacagacatagagatgaaccgacttggaaagtaactcaaatcctgctaggtatgaaaaaaactaacagatatcacgcctaggactagtgtgaaatagacatcagaattaagaaaaacgtagggtccaagtggttccccgttatggactcgctatctgtcaaccagatcttataccctgaagttcacctagatagcccgatagttaccaataagatagtagccatcctggagtatgctcgactgtttaaacctgcaggcatgcaagctgatctttttccctctgccaaaaattatggggacatcatgaagccccttgagcatctgacttctggctaataaaggaaatttattttcattgcaatagtgtgttggaattttttgtgtctctcactcggaaggacatatgggagggcaaatcatttaaaacatcagaatgagtatttggtttagagtttggcaacatatgcccatatgctggctgccatgaacaaaggttggctataaagaggtcatcagtatatgaaacagccccctgctgtccattccttattccatagaaaagccttgacttgaggttagattttttttatattttgttttgtgttatttttttctttaacatccctaaaattttccttacatgttttactagccagatttttcctcctctcctgactactcccagtcatagctgtccctcttctcttatggagatccctcgaggagctttttgcaaaagcctaggcctccaaaaaagcctcttcactacttctggaatagctcagaagccgaggcggcctcggcctctgcataaataaaaaaaattagtcagccatggggcggagaatgggcggaactgggcggagttaggggcgggatgggcggagttaggggcgggactatggttgctgactaattgctgcattaatgaatcggccaacgcgcggggagaggcggtttgcgtattgggcgctcttccgcttcctcgctcactgactcgctgcgctcggtcgttcggctgcggcgagcggtatcagctcactcaaaggcggtaatacggttatccacagaatcaggggataacgcaggaaagaacatgtgagcaaaaggccagcaaaaggccaggaaccgtaaaaaggccgcgttgctggcgtttttccataggctccgcccccctgacgagcatcacaaaaatcgacgctcaagtcagaggtggcgaaacccgacaggactataaagataccaggcgtttccccctggaagctccctcgtgcgctctcctgttccgaccctgccgcttaccggatacctgtccgcctttctcccttcgggaagcgtggcgctttctcatagctcacgctgtaggtatctcagttcggtgtaggtcgttcgctccaagctgggctgtgtgcacgaaccccccgttcagcccgaccgctgcgccttatccggtaactatcgtcttgagtccaacccggtaagacacgacttatcgccactggcagcagccactggtaacaggattagcagagcgaggtatgtaggcggtgctacagagttcttgaagtggtggcctaactacggctacactagaagaacagtatttggtatctgcgctctgctgaagccagttaccttcggaaaaagagttggtagctcttgatccggcaaacaaaccaccgctggtagcggtggtttttttgtttgcaagcagcagattacgcgcagaaaaaaaggatctcaagaagatcctttgatcttttctacggggtctgacgctcagtggaacgaaaactcacgttaagggattttggtcatgagattatcaaaaaggatcttcacctagatccttttaaattaaaaatgaagttttaaatcaatctaaagtatatatgagtaaacttggtctgacagttaccaatgcttaatcagtgaggcacctatctcagcgatctgtctatttcgttcatccatagttgcctgactccccgtcgtgtagataactacgatacgggagggcttaccatctggccccagtgctgcaatgataccgcgagacccacgctcaccggctccagatttatcagcaataaaccagccagccggaagggccgagcgcagaagtggtcctgcaactttatccgcctccatccagtctattaattgttgccgggaagctagagtaagtagttcgccagttaatagtttgcgcaacgttgttgccattgctacaggcatcgtggtgtcacgctcgtcgtttggtatggcttcattcagctccggttcccaacgatcaaggcgagttacatgatcccccatgttgtgcaaaaaagcggttagctccttcggtcctccgatagttgtcagaagtaagttggccgcagtgttatcactcatggttatggcagcactgcataattctcttactgtcatgccatccgtaagatgcttttctgtgactggtgagtactcaaccaagtcattctgagaatagtgtatgcggcgaccgagttgctcttgcccggcgtcaatacgggataataccgcgccacatagcagaactttaaaagtgctcatcattggaaaacgttcttcggggcgaaaactctcaaggatcttaccgctgttgagatccagttcgatgtaacccactcgtgcacccaactgatcttcagcatcttttactttcaccagcgtttctgggtgagcaaaaacaggaaggcaaaatgccgcaaaaaagggaataagggcgacacggaaatgttgaatactcatactcttcctttttcaatattattgaagcatttatcagggttattgtctcatgagcggatacatatttgaatgtatttagaaaaataaacaaataggggttccgcgcacatttccccgaaaagtgccacctgacgtctaagaaaccattattatcatgacattaacctataaaaataggcgtatcacgaggccctttcgtctcgcgcgtttcggtgatgacggtgaaaacctctgacacatgcagctcccggagacggtcacagcttgtctgtaagcggatgccgggagcagacaagcccgtcagggcgcgtcagcgggtgttggcgggtgtcggggctggcttaactatgcggcatcagagcagattgtactgagagtgcaccattcgacgctctcccttatgcgactcctgcattaggaagcagcccagtagtaggttgaggccgttgagcaccgccgccgcaaggaatggtctggcttatcgaaattaatacgactcactatagggagacc

SEQ ID NO: 202 - DNA, 9836 bp, synthetic construct
  source 1..9836: mol_type = other DNA
gtcgacggatcgggagatctcccgatcccctatggtgcactctcagtacaatctgctctgatgccgcatagttaagccagtatctgctccctgcttgtgtgttggaggtcgctgagtagtgcgcgagcaaaatttaagctacaacaaggcaaggcttgaccgacaattgcatgaagaatctgcttagggttaggcgttttgcgctgcttcgcgatgtacgggccagatattgacattgattattgactagttattaatagtaatcaattacggggtcattagttcatagcccatatatggagttccgcgttacataacttacggtaaatggcccgcctggctgaccgcccaacgacccccgcccattgacgtcaataatgacgtatgttcccatagtaacgccaatagggactttccattgacgtcaatgggtggagtatttacggtaaactgcccacttggcagtacatcaagtgtatcatatgccaagtacgccccctattgacgtcaatgacggtaaatggcccgcctggcattatgcccagtacatgaccttatgggactttcctacttggcagtacatctacgtattagtcatcgctattaccatggtgatgcggttttggcagtacatcaatgggcgtggatagcggtttgactcacggggatttccaagtctccaccccattgacgtcaatgggagtttgttttggcaccaaaatcaacgggactttccaaaatgtcgtaacaactccgccccattgacgcaaatgggcggtaggcgtgtacggtgggaggtctatataagcagcgcgttttgcctgtactgggtctctctggttagaccagatctgagcctgggagctctctggctaactagggaacccactgcttaagcctcaataaagcttgccttgagtgcttcaagtagtgtgtgcccgtctgttgtgtgactctggtaactagagatccctcagacccttttagtcagtgtggaaaatctctagcagtggcgcccgaacagggacttgaaagcgaaagggaaaccagaggagctctctcgacgcaggactcggcttgctgaagcgcgcacggcaagaggcgaggggcggcgactggtgagtacgccaaaaattttgactagcggaggctagaaggagagagatgggtgcgagagcgtcagtattaagcgggggagaattagatcgcgatgggaaaaaattcggttaaggccagggggaaagaaaaaatataaattaaaacatatagtatgggcaagcagggagctagaacgattcgcagttaatcctggcctgttagaaacatcagaaggctgtagacaaatactgggacagctacaaccatcccttcagacaggatcagaagaacttagatcattatataatacagtagcaaccctctattgtgtgcatcaaaggatagagataaaagacaccaaggaagctttagacaagatagaggaagagcaaaacaaaagtaagaccaccgcacagcaagcggccgctgatcttcagacctggaggaggagatatgagggacaattggagaagtgaattatataaatataaagtagtaaaaattgaaccattaggagtagcacccaccaaggcaaagagaagagtggtgcagagagaaaaaagagcagtgggaataggagctttgttccttgggttcttgggagcagcaggaagcactatgggcgcagcgtcaatgacgctgacggtacaggccagacaattattgtctggtatagtgcagcagcagaacaatttgctgagggctattgaggcgcaacagcatctgttgcaactcacagtctggggcatcaagcagctccaggcaagaatcctggctgtggaaagatacctaaaggatcaacagctcctggggatttggggttgctctggaaaactcatttgcaccactgctgtgccttggaatgctagttggagtaataaatctctggaacagatttggaatcacacgacctggatggagtgggacagagaaattaacaattacacaagcttaatacactccttaattgaagaatcgcaaaaccagcaagaaaagaatgaacaagaattattggaattagataaatgggcaagtttgtggaattggtttaacataacaaattggctgtggtatataaaattattcataatgatagtaggaggcttggtaggtttaagaatagtttttgctgtactttctatagtgaatagagttaggcagggatattcaccattatcgtttcagacccacctcccaaccccgaggggacccgacaggcccgaaggaatagaagaagaaggtggagagagagacagagacagatccattcgattagtgaacggatcggcactgcgtgcgccaattctgcagacaaatggcagtattcatccacaattttaaaagaaaaggggggattggggggtacagtgcaggggaaagaatagtagacataatagcaacagacatacaaactaaagaattacaaaaacaaattacaaaaattcaaaattttcgggtttattacagggacagcagagatccagtttggttaattaaggtaccgagggcctatttcccatgattccttcatatttgcatatacgatacaaggctgttagagagataattagaattaatttgactgtaaacacaaagatattagtacaaaatacgtgacgtagaaagtaataatttcttgggtagtttgcagttttaaaattatgttttaaaatggactatcatatgcttaccgtaacttgaaagtatttcgatttcttggctttatatatcttgtggaaaggacgaaacaccgagggatgagtcatgtggcaggtttaagagctatgctggaaacagcatagcaagtttaaataaggctagtccgttatcaacttgaaaaagtggcaccgagtcggtgctttttttgaattcgctagctaggtcttgaaaggagtgggaattggctccggtgcccgtcagtgggcagagcgcacatcgcccacagtccccgagaagttggggggaggggtcggcaattgatccggtgcctagagaaggtggcgcggggtaaactgggaaagtgatgtcgtgtactggctccgcctttttcccgagggtgggggagaaccgtatataagtgcagtagtcgccgtgaacgttctttttcgcaacgggtttgccgccagaacacaggtaagtgccgtgtgtggttcccgcgggcctggcctctttacgggttatggcccttgcgtgccttgaattacttccactggctgcagtacgtgattcttgatcccgagcttcgggttggaagtgggtgggagagttcgaggccttgcgcttaaggagccccttcgcctcgtgcttgagttgaggcctggcctgggcgctggggccgccgcgtgcgaatctggtggcaccttcgcgcctgtctcgctgctttcgataagtctctagccatttaaaatttttgatgacctgctgcgacgctttttttctggcaagatagtcttgtaaatgcgggccaagatctgcacactggtatttcggtttttggggccgcgggcggcgacggggcccgtgcgtcccagcgcacatgttcggcgaggcggggcctgcgagcgcggccaccgagaatcggacgggggtagtctcaagctggccggcctgctctggtgcctggcctcgcgccgccgtgtatcgccccgccctgggcggcaaggctggcccggtcggcaccagttgcgtgagcggaaagatggccgcttcccggccctgctgcagggagctcaaaatggaggacgcggcgctcgggagagcgggcgggtgagtcacccacacaaaggaaaagggcctttccgtcctcagccgtcgcttcatgtgactccacggagtaccgggcgccgtccaggcacctcgattagttctcgagcttttggagtacgtcgtctttaggttggggggaggggttttatgcgatggagtttccccacactgagtgggtggagactgaagttaggccagcttggcacttgatgtaattctccttggaatttgccctttttgagtttggatcttggttcattctcaagcctcagacagtggttcaaagtttttttcttccatttcaggtgtcgtgaaccggttctagagcgctgccaccatggtaagtaagggcgaagaggataatatggcttctttgcccgccacacacgaactgcacatattcggatcaataaacggggtggatttcgatatggtcggccagggaacaggaaaccctaatgacggctacgaagagctcaatctcaaatctaccaaaggggacttacaattctctccatggatcctagtgccacatattggatatggcttccatcaataccttccatatccagacggtatgagccccttccaggctgcaatggtggacgggtctggatatcaggttcacagaacaatgcaatttgaagacggtgcatcccttacagttaattacaggtacacatacgaaggaagtcacatcaaaggggaggcgcaggtgaagggcaccgggttcccagctgatggacctgtaatgacaaattcactcacagccgccgattggtgcaggtcaaagaagacctatcctaatgacaaaacaattatatccacatttaaatggtcttataccacaggaaatggaaagagatacagatctacagctagaacaacttacacatttgctaaaccaatggcagccaactaccttaagaatcaaccaatgtatgtcttcagaaagactgaactaaaacacagtaaaacagaacttaatttcaaagagtggcagaaggccttcacagacgttatgggtatggatgaactgtacaagtaaacgcgttaagtcgacaatcaacctctggattacaaaatttgtgaaagattgactggtattcttaactatgttgctccttttacgctatgtggatacgctgctttaatgcctttgtatcatgctattgcttcccgtatggctttcattttctcctccttgtataaatcctggttgctgtctctttatgaggagttgtggcccgttgtcaggcaacgtggcgtggtgtgcactgtgtttgctgacgcaacccccactggttggggcattgccaccacctgtcagctcctttccgggactttcgctttccccctccctattgccacggcggaactcatcgccgcctgccttgcccgctgctggacaggggctcggctgttgggcactgacaattccgtggtgttgtcggggaaatcatcgtcctttccttggctgctcgcctgtgttgccacctggattctgcgcgggacgtccttctgctacgtcccttcggccctcaatccagcggaccttccttcccgcggcctgctgccggctctgcggcctcttccgcgtcttcgccttcgccctcagacgagtcggatctccctttgggccgcctccccgcgtcgactttaagaccaatgacttacaaggcagctgtagatcttagccactttttaaaagaaaaggggggactggaagggctaattcactcccaacgaagacaagatctgctttttgcttgtactgggtctctctggttagaccagatctgagcctgggagctctctggctaactagggaacccactgcttaagcctcaataaagcttgccttgagtgcttcaagtagtgtgtgcccgtctgttgtgtgactctggtaactagagatccctcagacccttttagtcagtgtggaaaatctctagcagggcccgtttaaacccgctgatcagcctcgactgtgccttctagttgccagccatctgttgtttgcccctcccccgtgccttccttgaccctggaaggtgccactcccactgtcctttcctaataaaatgaggaaattgcatcgcattgtctgagtaggtgtcattctattctggggggtggggtggggcaggacagcaagggggaggattgggaagacaatagcaggcatgctggggatgcggtgggctctatggcttctgaggcggaaagaaccagctggggctctagggggtatccccacgcgccctgtagcggcgcattaagcgcggcgggtgtggtggttacgcgcagcgtgaccgctacacttgccagcgccctagcgcccgctcctttcgctttcttcccttcctttctcgccacgttcgccggctttccccgtcaagctctaaatcgggggctccctttagggttccgatttagtgctttacggcacctcgaccccaaaaaacttgattagggtgatggttcacgtagtgggccatcgccctgatagacggtttttcgccctttgacgttggagtccacgttctttaatagtggactcttgttccaaactggaacaacactcaaccctatctcggtctattcttttgatttataagggattttgccgatttcggcctattggttaaaaaatgagctgatttaacaaaaatttaacgcgaattaattctgtggaatgtgtgtcagttagggtgtggaaagtccccaggctccccagcaggcagaagtatgcaaagcatgcatctcaattagtcagcaaccaggtgtggaaagtccccaggctccccagcaggcagaagtatgcaaagcatgcatctcaattagtcagcaaccatagtcccgcccctaactccgcccatcccgcccctaactccgcccagttccgcccattctccgccccatggctgactaattttttttatttatgcagaggccgaggccgcctctgcctctgagctattccagaagtagtgaggaggcttttttggaggcctaggcttttgcaaaaagctcccgggagcttgtatatccattttcggatctgatcagcacgtgttgacaattaatcatcggcatagtatatcggcatagtataatacgacaaggtgaggaactaaaccatggccaagttgaccagtgccgttccggtgctcaccgcgcgcgacgtcgccggagcggtcgagttctggaccgaccggctcgggttctcccgggacttcgtggaggacgacttcgccggtgtggtccgggacgacgtgaccctgttcatcagcgcggtccaggaccaggtggtgccggacaacaccctggcctgggtgtgggtgcgcggcctggacgagctgtacgccgagtggtcggaggtcgtgtccacgaacttccgggacgcctccgggccggccatgaccgagatcggcgagcagccgtgggggcgggagttcgccctgcgcgacccggccggcaactgcgtgcacttcgtggccgaggagcaggactgacacgtgctacgagatttcgattccaccgccgccttctatgaaaggttgggcttcggaatcgttttccgggacgccggctggatgatcctccagcgcggggatctcatgctggagttcttcgcccaccccaacttgtttattgcagcttataatggttacaaataaagcaatagcatcacaaatttcacaaataaagcatttttttcactgcattctagttgtggtttgtccaaactcatcaatgtatcttatcatgtctgtataccgtcgacctctagctagagcttggcgtaatcatggtcatagctgtttcctgtgtgaaattgttatccgctcacaattccacacaacatacgagccggaagcataaagtgtaaagcctggggtgcctaatgagtgagctaactcacattaattgcgttgcgctcactgcccgctttccagtcgggaaacctgtcgtgccagctgcattaatgaatcggccaacgcgcggggagaggcggtttgcgtattgggcgctcttccgcttcctcgctcactgactcgctgcgctcggtcgttcggctgcggcgagcggtatcagctcactcaaaggcggtaatacggttatccacagaatcaggggataacgcaggaaagaacatgtgagcaaaaggccagcaaaaggccaggaaccgtaaaaaggccgcgttgctggcgtttttccataggctccgcccccctgacgagcatcacaaaaatcgacgctcaagtcagaggtggcgaaacccgacaggactataaagataccaggcgtttccccctggaagctccctcgtgcgctctcctgttccgaccctgccgcttaccggatacctgtccgcctttctcccttcgggaagcgtggcgctttctcatagctcacgctgtaggtatctcagttcggtgtaggtcgttcgctccaagctgggctgtgtgcacgaaccccccgttcagcccgaccgctgcgccttatccggtaactatcgtcttgagtccaacccggtaagacacgacttatcgccactggcagcagccactggtaacaggattagcagagcgaggtatgtaggcggtgctacagagttcttgaagtggtggcctaactacggctacactagaagaacagtatttggtatctgcgctctgctgaagccagttaccttcggaaaaagagttggtagctcttgatccggcaaacaaaccaccgctggtagcggtggtttttttgtttgcaagcagcagattacgcgcagaaaaaaaggatctcaagaagatcctttgatcttttctacggggtctgacgctcagtggaacgaaaactcacgttaagggattttggtcatgagattatcaaaaaggatcttcacctagatccttttaaattaaaaatgaagttttaaatcaatctaaagtatatatgagtaaacttggtctgacagttaccaatgcttaatcagtgaggcacctatctcagcgatctgtctatttcgttcatccatagttgcctgactccccgtcgtgtagataactacgatacgggagggcttaccatctggccccagtgctgcaatgataccgcgagacccacgctcaccggctccagatttatcagcaataaaccagccagccggaagggccgagcgcagaagtggtcctgcaactttatccgcctccatccagtctattaattgttgccgggaagctagagtaagtagttcgccagttaatagtttgcgcaacgttgttgccattgctacaggcatcgtggtgtcacgctcgtcgtttggtatggcttcattcagctccggttcccaacgatcaaggcgagttacatgatcccccatgttgtgcaaaaaagcggttagctccttcggtcctccgatcgttgtcagaagtaagttggccgcagtgttatcactcatggttatggcagcactgcataattctcttactgtcatgccatccgtaagatgcttttctgtgactggtgagtactcaaccaagtcattctgagaatagtgtatgcggcgaccgagttgctcttgcccggcgtcaatacgggataataccgcgccacatagcagaactttaaaagtgctcatcattggaaaacgttcttcggggcgaaaactctcaaggatcttaccgctgttgagatccagttcgatgtaacccactcgtgcacccaactgatcttcagcatcttttactttcaccagcgtttctgggtgagcaaaaacaggaaggcaaaatgccgcaaaaaagggaataagggcgacacggaaatgttgaatactcatactcttcctttttcaatattattgaagcatttatcagggttattgtctcatgagcggatacatatttgaatgtatttagaaaaataaacaaataggggttccgcgcacatttccccgaaaagtgccacctgac

SEQ ID NO: 203 - DNA, 10496 bp, synthetic construct
  source 1..10496: mol_type = other DNA
gcaggtggctaccttttcgctagcgaattgtaatacgactcactatagggcgaattggagctccaccgcggtggcggccgctctagagagcttggcccattgcatacgttgtatccatatcataatatgtacatttatattggctcatgtccaacattaccgccatgttgacattgattattgactagttattaatagtaatcaattacggggtcattagttcatagcccatatatggagttccgcgttacataacttacggtaaatggcccgcctggctgaccgcccaacgacccccgcccattgacgtcaataatgacgtatgttcccatagtaacgccaatagggactttccattgacgtcaatgggtggagtatttacggtaaactgcccacttggcagtacatcaagtgtatcatatgccaagtacgccccctattgacgtcaatgacggtaaatggcccgcctggcattatgcccagtacatgaccttatgggactttcctacttggcagtacatctacgtattagtcatcgctattaccatggtgatgcggttttggcagtacatcaatgggcgtggatagcggtttgactcacggggatttccaagtctccaccccattgacgtcaatgggagtttgttttggcaccaaaatcaacgggactttccaaaatgtcgtaacaactccgccccattgacgcaaatgggcggtaggcgtgtacggtgggaggtctatataagcagagctcgtttagtgaaccgtcagatcgcctggagacgccatccacgctgttttgacctccatagaagacaccgggaccgatccagcctccggtcgaccgatcctgagaacttcagggtgagtttggggacccttgattgttctttctttttcgctattgtaaaattcatgttatatggagggggcaaagttttcagggtgttgtttagaatgggaagatgtcccttgtatcaccatggaccctcatgataattttgtttctttcactttctactctgttgacaaccattgtctcctcttattttcttttcattttctgtaactttttcgttaaactttagcttgcatttgtaacgaatttttaaattcacttttgtttatttgtcagattgtaagtactttctctaatcacttttttttcaaggcaatcagggtatattatattgtacttcagcacagttttagagaacaattgttataattaaatgataaggtagaatatttctgcatataaattctggctggcgtggaaatattcttattggtagaaacaactacaccctggtcatcatcctgcctttctctttatggttacaatgatatacactgtttgagatgaggataaaatactctgagtccaaaccgggcccctctgctaaccatgggtgcgagagcgtcagtattaagcgggggagaattagatcgatgggaaaaaattcggttaaggccagggggaaagaaaaaatataaattaaaacatatagtatgggcaagcagggagctagaacgattcgcagttaatcctggcctgttagaaacatcagaaggctgtagacaaatactgggacagctacaaccatcccttcagacaggatcagaagaacttagatcattatataatacagtagcaaccctctattgtgtgcatcaaaggatagagataaaagacaccaaggaagctttagacaagatagaggaagagcaaaacaaaagtaagaaaaaagcacagcaagcagcagctgacacaggacacagcaatcaggtcagccaaaattaccctatagtgcagaacatccaggggcaaatggtacatcaggccatatcacctagaactttaaatgcatgggtaaaagtagtagaagagaaggctttcagcccagaagtgatacccatgttttcagcattatcagaaggagccaccccacaagatttaaacaccatgctaaacacagtggggggacatcaagcagccatgcaaatgttaaaagagaccatcaatgaggaagctgcagaatgggatagagtgcatccagtgcatgcagggcctattgcaccaggccagatgagagaaccaaggggaagtgacatagcaggaactactagtacccttcaggaacaaataggatggatgacacataatccacctatcccagtaggagaaatctataaaagatggataatcctgggattaaataaaatagtaagaatgtatagccctaccagcattctggacataagacaaggaccaaaggaaccctttagagactatgtagaccgattctataaaactctaagagccgagcaagcttcacaagaggtaaaaaattggatgacagaaaccttgttggtccaaaatgcgaacccagattgtaagactattttaaaagcattgggaccaggagcgacactagaagaaatgatgacagcatgtcagggagtggggggacccggccataaagcaagagttttggctgaagcaatgagccaagtaacaaatccagctaccataatgatacagaaaggcaattttaggaaccaaagaaagactgttaagtgtttcaattgtggcaaagaagggcacatagccaaaaattgcagggcccctaggaaaaagggctgttggaaatgtggaaaggaaggacaccaaatgaaagattgtactgagagacaggctaattttttagggaagatctggccttcccacaagggaaggccagggaattttcttcagagcagaccagagccaacagccccaccagaagagagcttcaggtttggggaagagacaacaactccctctcagaagcaggagccgatagacaaggaactgtatcctttagcttccctcagatcactctttggcagcgacccctcgtcacaaggcgccaaagcaagagttttggctgaagcaatgagcgattacaaagacgatgacgataagatggccccaaagaagaagcggaaggtcggtatccacggagtcccagcagccgacaagaagtacagcatcggcctggacatcggcaccaactctgtgggctgggccgtgatcaccgacgagtacaaggtgcccagcaagaaattcaaggtgctgggcaacaccgaccggcacagcatcaagaagaacctgatcggagccctgctgttcgacagcggcgaaacagccgaggccacccggctgaagagaaccgccagaagaagatacaccagacggaagaaccggatctgctatctgcaagagatcttcagcaacgagatggccaaggtggacgacagcttcttccacagactggaagagtccttcctggtggaagaggataagaagcacgagcggcaccccatcttcggcaacatcgtggacgaggtggcctaccacgagaagtaccccaccatctaccacctgagaaagaaactggtggacagcaccgacaaggccgacctgcggctgatctatctggccctggcccacatgatcaagttccggggccacttcctgatcgagggcgacctgaaccccgacaacagcgacgtggacaagctgttcatccagctggtgcagacctacaaccagctgttcgaggaaaaccccatcaacgccagcggcgtggacgccaaggccatcctgtctgccagactgagcaagagcagacggctggaaaatctgatcgcccagctgcccggcgagaagaagaatggcctgttcggaaacctgattgccctgagcctgggcctgacccccaacttcaagagcaacttcgacctggccgaggatgccaaactgcagctgagcaaggacacctacgacgacgacctggacaacctgctggcccagatcggcgaccagtacgccgacctgtttctggccgccaagaacctgtccgacgccatcctgctgagcgacatcctgagagtgaacaccgagatcaccaaggcccccctgagcgcctctatgatcaagagatacgacgagcaccaccaggacctgaccctgctgaaagctctcgtgcggcagcagctgcctgagaagtacaaagagattttcttcgaccagagcaagaacggctacgccggctacattgacggcggagccagccaggaagagttctacaagttcatcaagcccatcctggaaaagatggacggcaccgaggaactgctcgtgaagctgaacagagaggacctgctgcggaagcagcggaccttcgacaacggcagcatcccccaccagatccacctgggagagctgcacgccattctgcggcggcaggaagatttttacccattcctgaaggacaaccgggaaaagatcgagaagatcctgaccttccgcatcccctactacgtgggccctctggccaggggaaacagcagattcgcctggatgaccagaaagagcgaggaaaccatcaccccctggaacttcgaggaagtggtggacaagggcgcttccgcccagagcttcatcgagcggatgaccaacttcgataagaacctgcccaacgagaaggtgctgcccaagcacagcctgctgtacgagtacttcaccgtgtataacgagctgaccaaagtgaaatacgtgaccgagggaatgagaaagcccgccttcctgagcggcgagcagaaaaaggccatcgtggacctgctgttcaagaccaaccggaaagtgaccgtgaagcagctgaaagaggactacttcaagaaaatcgagtgcttcgactccgtggaaatctccggcgtggaagatcggttcaacgcctccctgggcacataccacgatctgctgaaaattatcaaggacaaggacttcctggacaatgaggaaaacgaggacattctggaagatatcgtgctgaccctgacactgtttgaggacagagagatgatcgaggaacggctgaaaacctatgcccacctgttcgacgacaaagtgatgaagcagctgaagcggcggagatacaccggctggggcaggctgagccggaagctgatcaacggcatccgggacaagcagtccggcaagacaatcctggatttcctgaagtccgacggcttcgccaacagaaacttcatgcagctgatccacgacgacagcctgacctttaaagaggacatccagaaagcccaggtgtccggccagggcgatagcctgcacgagcacattgccaatctggccggcagccccgccattaagaagggcatcctgcagacagtgaaggtggtggacgagctcgtgaaagtgatgggccggcacaagcccgagaacatcgtgatcgaaatggccagagagaaccagaccacccagaagggacagaagaacagccgcgagagaatgaagcggatcgaagagggcatcaaagagctgggcagccagatcctgaaagaacaccccgtggaaaacacccagctgcagaacgagaagctgtacctgtactacctgcagaatgggcgggatatgtacgtggaccaggaactggacatcaaccggctgtccgactacgatgtggaccatatcgtgcctcagagctttctgaaggacgactccatcgacaacaaggtgctgaccagaagcgacaagaaccggggcaagagcgacaacgtgccctccgaagaggtcgtgaagaagatgaagaactactggcggcagctgctgaacgccaagctgattacccagagaaagttcgacaatctgaccaaggccgagagaggcggcctgagcgaactggataaggccggcttcatcaagagacagctggtggaaacccggcagatcacaaagcacgtggcacagatcctggactcccggatgaacactaagtacgacgagaatgacaagctgatccgggaagtgaaagtgatcaccctgaagtccaagctggtgtccgatttccggaaggatttccagttttacaaagtgcgcgagatcaacaactaccaccacgcccacgacgcctacctgaacgccgtcgtgggaaccgccctgatcaaaaagtaccctaagctggaaagcgagttcgtgtacggcgactacaaggtgtacgacgtgcggaagatgatcgccaagagcgagcaggaaatcggcaaggctaccgccaagtacttcttctacagcaacatcatgaactttttcaagaccgagattaccctggccaacggcgagatccggaagcggcctctgatcgagacaaacggcgaaaccggggagatcgtgtgggataagggccgggattttgccaccgtgcggaaagtgctgagcatgccccaagtgaatatcgtgaaaaagaccgaggtgcagacaggcggcttcagcaaagagtctatcctgcccaagaggaacagcgataagctgatcgccagaaagaaggactgggaccctaagaagtacggcggcttcgacagccccaccgtggcctattctgtgctggtggtggccaaagtggaaaagggcaagtccaagaaactgaagagtgtgaaagagctgctggggatcaccatcatggaaagaagcagcttcgagaagaatcccatcgactttctggaagccaagggctacaaagaagtgaaaaaggacctgatcatcaagctgcctaagtactccctgttcgagctggaaaacggccggaagagaatgctggcctctgccggcgaactgcagaagggaaacgaactggccctgccctccaaatatgtgaacttcctgtacctggccagccactatgagaagctgaagggctcccccgaggataatgagcagaaacagctgtttgtggaacagcacaagcactacctggacgagatcatcgagcagatcagcgagttctccaagagagtgatcctggccgacgctaatctggacaaagtgctgtccgcctacaacaagcaccgggataagcccatcagagagcaggccgagaatatcatccacctgtttaccctgaccaatctgggagcccctgccgccttcaagtactttgacaccaccatcgaccggaagaggtacaccagcaccaaagaggtgctggacgccaccctgatccaccagagcatcaccggcctgtacgagacacggatcgacctgtctcagctgggaggcgacaagcgtcctgctgctactaagaaagctggtcaagctaagaaaaagaaatcgcgagctaggtacctgcatcctcaggtgcaggctgcctatcagaaggtggtggctggtgtggccaatgccctggctcacaaataccactgagatctttttccctctgccaaaaattatggggacatcatgaagccccttgagcatctgacttctggctaataaaggaaatttattttcattgcaatagtgtgttggaattttttgtgtctctcactcggaaggacatatgggagggcaaatcatttaaaacatcagaatgagtatttggtttagagtttggcaacatatgcccatatgctggctgccatgaacaaaggttggctataaagaggtcatcagtatatgaaacagccccctgctgtccattccttattccatagaaaagccttgacttgaggttagattttttttatattttgttttgtgttatttttttctttaacatccctaaaattttccttacatgttttactagccagatttttcctcctctcctgactactcccagtcatagctgtccctcttctcttatggagatccctcgacggatcggccgcaattcgtaatcatcccggggtcatagctgtttcctgtgtgaaattgttatccgctcacaattccacacaacatacgagccggaagcataaagtgtaaagcctggggtgcctaatgagtgagctaactcacattaattgcgttgcgctcactgcccgctttccagtcgggaaacctgtcgtgccagctgcattaatgaatcggccaacgcgcggggagaggcggtttgcgtattgggcgctcttccgcttcctcgctcactgactcgctgcgctcggtcgttcggctgcggcgagcggtatcagctcactcaaaggcggtaatacggttatccacagaatcaggggataacgcaggaaagaacatgtgagcaaaaggccagcaaaaggccaggaaccgtaaaaaggccgcgttgctggcgtttttccataggctccgcccccctgacgagcatcacaaaaatcgacgctcaagtcagaggtggcgaaacccgacaggactataaagataccaggcgtttccccctggaagctccctcgtgcgctctcctgttccgaccctgccgcttaccggatacctgtccgcctttctcccttcgggaagcgtggcgctttctcatagctcacgctgtaggtatctcagttcggtgtaggtcgttcgctccaagctgggctgtgtgcacgaaccccccgttcagcccgaccgctgcgccttatccggtaactatcgtcttgagtccaacccggtaagacacgacttatcgccactggcagcagccactggtaacaggattagcagagcgaggtatgtaggcggtgctacagagttcttgaagtggtggcctaactacggctacactagaagaacagtatttggtatctgcgctctgctgaagccagttaccttcggaaaaagagttggtagctcttgatccggcaaacaaaccaccgctggtagcggtggtttttttgtttgcaagcagcagattacgcgcagaaaaaaaggatctcaagaagatcctttgatcttttctacggggtctgacgctcagtggaacgaaaactcacgttaagggattttggtcatgagattatcaaaaaggatcttcacctagatccttttaaattaaaaatgaagttttaaatcaatctaaagtatatatgagtaaacttggtctgacagttaccaatgcttaatcagtgaggcacctatctcagcgatctgtctatttcgttcatccatagttgcctgactccccgtcgtgtagataactacgatacgggagggcttaccatctggccccagtgctgcaatgataccgcgagacccacgctcaccggctccagatttatcagcaataaaccagccagccggaagggccgagcgcagaagtggtcctgcaactttatccgcctccatccagtctattaattgttgccgggaagctagagtaagtagttcgccagttaatagtttgcgcaacgttgttgccattgctacaggcatcgtggtgtcacgctcgtcgtttggtatggcttcattcagctccggttcccaacgatcaaggcgagttacatgatcccccatgttgtgcaaaaaagcggttagctccttcggtcctccgatcgttgtcagaagtaagttggccgcagtgttatcactcatggttatggcagcactgcataattctcttactgtcatgccatccgtaagatgcttttctgtgactggtgagtactcaaccaagtcattctgagaatagtgtatgcggcgaccgagttgctcttgcccggcgtcaatacgggataataccgcgccacatagcagaactttaaaagtgctcatcattggaaaacgttcttcggggcgaaaactctcaaggatcttaccgctgttgagatccagttcgatgtaacccactcgtgcacccaactgatcttcagcatcttttactttcaccagcgtttctgggtgagcaaaaacaggaaggcaaaatgccgcaaaaaagggaataagggcgacacggaaatgttgaatactcatactcttcctttttcaatattattgaagcatttatcagggttattgtctcatgagcggatacatatttgaatgtatttagaaaaataaacaaataggggttccgcgcacatttccccgaaaagtgccacctaaattgtaagcgttaatattttgttaaaattcgcgttaaatttttgttaaatcagctcattttttaaccaataggccgaaatcggcaaaatcccttataaatcaaaagaatagaccgagatagggttgagtgttgttccagtttggaacaagagtccactattaaagaacgtggactccaacgtcaaagggcgaaaaaccgtctatcagggcgatggcccactacgtgaaccatcaccctaatcaagttttttggggtcgaggtgccgtaaagcactaaatcggaaccctaaagggagcccccgatttagagcttgacggggaaagccggcgaacgtggcgagaaaggaagggaagaaagcgaaaggagcgggcgctagggcgctggcaagtgtagcggtcacgctgcgcgtaaccaccacacccgccgcgcttaatgcgccgctacagggcgcgtcccattcgccattcaggctgcgcaactgttgggaagggcgatcggtgcgggcctcttcgctattacgccagctggcgaaagggggatgtgctgcaaggcgattaagttgggtaacgccagggttttcccagtcacgacgtt

SEQ ID NO: 204 - DNA, 9025 bp, synthetic construct
  source 1..9025: mol_type = other DNA
gtcgacattgattattgactagttattaatagtaatcaattacggggtcattagttcatagcccatatatggagttccgcgttacataacttacggtaaatggcccgcctggctgaccgcccaacgacccccgcccattgacgtcaataatgacgtatgttcccatagtaacgccaatagggactttccattgacgtcaatgggtggactatttacggtaaactgcccacttggcagtacatcaagtgtatcatatgccaagtacgccccctattgacgtcaatgacggtaaatggcccgcctggcattatgcccagtacatgaccttatgggactttcctacttggcagtacatctacgtattagtcatcgctattaccatgggtcgaggtgagccccacgttctgcttcactctccccatctcccccccctccccacccccaattttgtatttatttattttttaattattttgtgcagcgatgggggcggggggggggggggcgcgcgccaggcggggcggggcggggcgaggggcggggcggggcgaggcggagaggtgcggcggcagccaatcagagcggcgcgctccgaaagtttccttttatggcgaggcggcggcggcggcggccctataaaaagcgaagcgcgcggcgggcgggagtcgctgcgttgccttcgccccgtgccccgctccgcgccgcctcgcgccgcccgccccggctctgactgaccgcgttactcccacaggtgagcgggcgggacggcccttctcctccgggctgtaattagcgcttggtttaatgacggctcgtttcttttctgtggctgcgtgaaagccttaaagggctccgggagggccctttgtgcgggggggagcggctcggggggtgcgtgcgtgtgtgtgtgcgtggggagcgccgcgtgcggcccgcgctgcccggcggctgtgagcgctgcgggcgcggcgcggggctttgtgcgctccgcgtgtgcgcgaggggagcgcggccgggggcggtgccccgcggtgcgggggggctgcgaggggaacaaaggctgcgtgcggggtgtgtgcgtgggggggtgagcagggggtgtgggcgcggcggtcgggctgtaacccccccctgcacccccctccccgagttgctgagcacggcccggcttcgggtgcggggctccgtgcggggcgtggcgcggggctcgccgtgccgggcggggggtggcggcaggtgggggtgccgggcggggcggggccgcctcgggccggggagggctcgggggaggggcgcggcggccccggagcgccggcggctgtcgaggcgcggcgagccgcagccattgccttttatggtaatcgtgcgagagggcgcagggacttcctttgtcccaaatctggcggagccgaaatctgggaggcgccgccgcaccccctctagcgggcgcgggcgaagcggtgcggcgccggcaggaaggaaatgggcggggagggccttcgtgcgtcgccgcgccgccgtccccttctccatctccagcctcggggctgccgcagggggacggctgccttcgggggggacggggcagggcggggttcggcttctggcgtgtgaccggcggctctagagcctctgctaaccatgttcatgccttcttctttttcctacagctcctgggcaacgtgctggttgttgtgctgtctcatcattttggcaaagaattcgccaccatgggtgcgagagcgtcagtattaagcgggggagaattagatcgatgggaaaaaattcggttaaggccagggggaaagaaaaaatataaattaaaacatatagtatgggcaagcagggagctagaacgattcgcagttaatcctggcctgttagaaacatcagaaggctgtagacaaatactgggacagctacaaccatcccttcagacaggatcagaagaacttagatcattatataatacagtagcaaccctctattgtgtgcatcaaaggatagagataaaagacaccaaggaagctttagacaagatagaggaagagcaaaacaaaagtaagaaaaaagcacagcaagcagcagctgacacaggacacagcaatcaggtcagccaaaattaccctatagtgcagaacatccaggggcaaatggtacatcaggccatatcacctagaactttaaatgcatgggtaaaagtagtagaagagaaggctttcagcccagaagtgatacccatgttttcagcattatcagaaggagccaccccacaagatttaaacaccatgctaaacacagtggggggacatcaagcagccatgcaaatgttaaaagagaccatcaatgaggaagctgcagaatgggatagagtgcatccagtgcatgcagggcctattgcaccaggccagatgagagaaccaaggggaagtgacatagcaggaactactagtacccttcaggaacaaataggatggatgacacataatccacctatcccagtaggagaaatctataaaagatggataatcctgggattaaataaaatagtaagaatgtatagccctaccagcattctggacataagacaaggaccaaaggaaccctttagagactatgtagaccgattctataaaactctaagagccgagcaagcttcacaagaggtaaaaaattggatgacagaaaccttgttggtccaaaatgcgaacccagattgtaagactattttaaaagcattgggaccaggagcgacactagaagaaatgatgacagcatgtcagggagtggggggacccggccataaagcaagagttttggctgaagcaatgagccaagtaacaaatccagctaccataatgatacagaaaggcaattttaggaaccaaagaaagactgttaagtgtttcaattgtggcaaagaagggcacatagccaaaaattgcagggcccctaggaaaaagggctgttggaaatgtggaaaggaaggacaccaaatgaaagattgtactgagagacaggctaattttttagggaagatctggccttcccacaagggaaggccagggaattttcttcagagcagaccagagccaacagccccaccagaagagagcttcaggtttggggaagagacaacaactccctctcagaagcaggagccgatagacaaggaactgtatcctttagcttccctcagatcactctttggcagcgacccctcgtcacaataaagataggggggcaattaaaggaagctctattagatacaggagcagatgatacagtattagaagaaatgaatttgccaggaagatggaaaccaaaaatgatagggggaattggaggttttatcaaagtaagacagtatgatcagatactcatagaaatctgcggacataaagctataggtacagtattagtaggacctacacctgtcaacataattggaagaaatctgttgactcagattggctgcactttaaattttcccattagtcctattgagactgtaccagtaaaattaaagccaggaatggatggcccaaaagttaaacaatggccattgacagaagaaaaaataaaagcattagtagaaatttgtacagaaatggaaaaggaaggaaaaatttcaaaaattgggcctgaaaatccatacaatactccagtatttgccataaagaaaaaagacagtactaaatggagaaaattagtagatttcagagaacttaataagagaactcaagatttctgggaagttcaattaggaataccacatcctgcagggttaaaacagaaaaaatcagtaacagtactggatgtgggcgatgcatatttttcagttcccttagataaagacttcaggaagtatactgcatttaccatacctagtataaacaatgagacaccagggattagatatcagtacaatgtgcttccacagggatggaaaggatcaccagcaatattccagtgtagcatgacaaaaatcttagagccttttagaaaacaaaatccagacatagtcatctatcaatacatggatgatttgtatgtaggatctgacttagaaatagggcagcatagaacaaaaatagaggaactgagacaacatctgttgaggtggggatttaccacaccagacaaaaaacatcagaaagaacctccattcctttggatgggttatgaactccatcctgataaatggacagtacagcctatagtgctgccagaaaaggacagctggactgtcaatgacatacagaaattagtgggaaaattgaattgggcaagtcagatttatgcagggattaaagtaaggcaattatgtaaacttcttaggggaaccaaagcactaacagaagtagtaccactaacagaagaagcagagctagaactggcagaaaacagggagattctaaaagaaccggtacatggagtgtattatgacccatcaaaagacttaatagcagaaatacagaagcaggggcaaggccaatggacatatcaaatttatcaagagccatttaaaaatctgaaaacaggaaagtatgcaagaatgaagggtgcccacactaatgatgtgaaacaattaacagaggcagtacaaaaaatagccacagaaagcatagtaatatggggaaagactcctaaatttaaattacccatacaaaaggaaacatgggaagcatggtggacagagtattggcaagccacctggattcctgagtgggagtttgtcaatacccctcccttagtgaagttatggtaccagttagagaaagaacccataataggagcagaaactttctatgtagatggggcagccaatagggaaactaaattaggaaaagcaggatatgtaactgacagaggaagacaaaaagttgtccccctaacggacacaacaaatcagaagactgagttacaagcaattcatctagctttgcaggattcgggattagaagtaaacatagtgacagactcacaatatgcattgggaatcattcaagcacaaccagataagagtgaatcagagttagtcagtcaaataatagagcagttaataaaaaaggaaaaagtctacctggcatgggtaccagcacacaaaggaattggaggaaatgaacaagtagataaattggtcagtgctggaatcaggaaagtactatttttagatggaatagataaggcccaagaagaacatgagaaatatcacagtaattggagagcaatggctagtgattttaacctaccacctgtagtagcaaaagaaatagtagccagctgtgataaatgtcagctaaaaggggaagccatgcatggacaagtagactgtagcccaggaatatggcagctagattgtacacatttagaaggaaaagttatcttggtagcagttcatgtagccagtggatatatagaagcagaagtaattccagcagagacagggcaagaaacagcatacttcctcttaaaattagcaggaagatggccagtaaaaacagtacatacagacaatggcagcaatttcaccagtactacagttaaggccgcctgttggtgggcggggatcaagcaggaatttggcattccctacaatccccaaagtcaaggagtaatagaatctatgaataaagaattaaagaaaattataggacaggtaagagatcaggctgaacatcttaagacagcagtacaaatggcagtattcatccacaattttaaaagaaaaggggggattggggggtacagtgcaggggaaagaatagtagacataatagcaacagacatacaaactaaagaattacaaaaacaaattacaaaaattcaaaattttcgggtttattacagggacagcagagatccagtttggaaaggaccagcaaagctcctctggaaaggtgaaggggcagtagtaatacaagataatagtgacataaaagtagtgccaagaagaaaagcaaagatcatcagggattatggaaaacagatggcaggtgatgattgtgtggcaagtagacaggatgaggattaagctagcagatctttttccctctgccaaaaattatggggacatcatgaagccccttgagcatctgacttctggctaataaaggaaatttattttcattgcaatagtgtgttggaattttttgtgtctctcactcggaaggacatatgggagggcaaatcatttaaaacatcagaatgagtatttggtttagagtttggcaacatatgcccatatgctggctgccatgaacaaaggttggctataaagaggtcatcagtatatgaaacagccccctgctgtccattccttattccatagaaaagccttgacttgaggttagattttttttatattttgttttgtgttatttttttctttaacatccctaaaattttccttacatgttttactagccagatttttcctcctctcctgactactcccagtcatagctgtccctcttctcttatgaagatccctcgacctgcagcccaagcttggcgtaatcatggtcatagctgtttcctgtgtgaaattgttatccgctcacaattccacacaacatacgagccggaagcataaagtgtaaagcctggggtgcctaatgagtgagctaactcacattaattgcgttgcgctcactgcccgctttccagtcgggaaacctgtcgtgccagcggatccgcatctcaattagtcagcaaccatagtcccgcccctaactccgcccatcccgcccctaactccgcccagttccgcccattctccgccccatggctgactaattttttttatttatgcagaggccgaggccgcctcggcctctgagctattccagaagtagtgaggaggcttttttggaggcctaggcttttgcaaaaagctaacttgtttattgcagcttataatggttacaaataaagcaatagcatcacaaatttcacaaataaagcatttttttcactgcattctagttgtggtttgtccaaactcatcaatgtatcttatcatgtctggatccgctgcattaatgaatcggccaacgcgcggggagaggcggtttgcgtattgggcgctcttccgcttcctcgctcactgactcgctgcgctcggtcgttcggctgcggcgagcggtatcagctcactcaaaggcggtaatacggttatccacagaatcaggggataacgcaggaaagaacatgtgagcaaaaggccagcaaaaggccaggaaccgtaaaaaggccgcgttgctggcgtttttccataggctccgcccccctgacgagcatcacaaaaatcgacgctcaagtcagaggtggcgaaacccgacaggactataaagataccaggcgtttccccctggaagctccctcgtgcgctctcctgttccgaccctgccgcttaccggatacctgtccgcctttctcccttcgggaagcgtggcgctttctcaatgctcacgctgtaggtatctcagttcggtgtaggtcgttcgctccaagctgggctgtgtgcacgaaccccccgttcagcccgaccgctgcgccttatccggtaactatcgtcttgagtccaacccggtaagacacgacttatcgccactggcagcagccactggtaacaggattagcagagcgaggtatgtaggcggtgctacagagttcttgaagtggtggcctaactacggctacactagaaggacagtatttggtatctgcgctctgctgaagccagttaccttcggaaaaagagttggtagctcttgatccggcaaacaaaccaccgctggtagcggtggtttttttgtttgcaagcagcagattacgcgcagaaaaaaaggatctcaagaagatcctttgatcttttctacggggtctgacgctcagtggaacgaaaactcacgttaagggattttggtcatgagattatcaaaaaggatcttcacctagatccttttaaattaaaaatgaagttttaaatcaatctaaagtatatatgagtaaacttggtctgacagttaccaatgcttaatcagtgaggcacctatctcagcgatctgtctatttcgttcatccatagttgcctgactccccgtcgtgtagataactacgatacgggagggcttaccatctggccccagtgctgcaatgataccgcgagacccacgctcaccggctccagatttatcagcaataaaccagccagccggaagggccgagcgcagaagtggtcctgcaactttatccgcctccatccagtctattaattgttgccgggaagctagagtaagtagttcgccagttaatagtttgcgcaacgttgttgccattgctacaggcatcgtggtgtcacgctcgtcgtttggtatggcttcattcagctccggttcccaacgatcaaggcgagttacatgatcccccatgttgtgcaaaaaagcggttagctccttcggtcctccgatcgttgtcagaagtaagttggccgcagtgttatcactcatggttatggcagcactgcataattctcttactgtcatgccatccgtaagatgcttttctgtgactggtgagtactcaaccaagtcattctgagaatagtgtatgcggcgaccgagttgctcttgcccggcgtcaatacgggataataccgcgccacatagcagaactttaaaagtgctcatcattggaaaacgttcttcggggcgaaaactctcaaggatcttaccgctgttgagatccagttcgatgtaacccactcgtgcacccaactgatcttcagcatcttttactttcaccagcgtttctgggtgagcaaaaacaggaaggcaaaatgccgcaaaaaagggaataagggcgacacggaaatgttgaatactcatactcttcctttttcaatattattgaagcatttatcagggttattgtctcatgagcggatacatatttgaatgtatttagaaaaataaacaaataggggttccgcgcacatttccccgaaaagtgccacctg

SEQ ID NO: 205 - DNA, 6917 bp, synthetic construct
  source 1..6917: mol_type = other DNA
ggaattcgagctcgccccgttacataacttacggtaaatggcccgcctggctgaccgcccaacgacccccgcccattgacgtcaataatgacgtatgttcccatagtaacgccaatagggactttccattgacgtcaatgggtggagtatttacggtaaactgcccacttggcagtacatcaagtgtatcatatgccaagtacgccccctattgacgtcaatgacggtaaatggcccgcctggcattatgcccagtacatgaccttatgggactttcctacttggcagtacatctacgtattagtcatcgctattaccatggtgatgcggttttggcagtacatcaatgggcgtggatagcggtttgactcacggggatttccaagtctccaccccattgacgtcaatgggagtttgttttggcaccaaaatcaacgggactttccaaaatgtcgtaacaactccgccccattgacgcaaatgggcggtaggcgtgtacggtgggaggtctatataagcagagctcgtttagtgaaccgtcagatcgcctggagacgccatccacgctgttttgacctccatagaagacaccgggaccgatccagcctccgggggatcgatccccccgatcctgagaacttcagggtgagtttggggacccttgattgttctttctttttcgctattgtaaaattcatgttatatggagggggcaaagttttcagggtgttgtttagaatgggaagatgtcccttgtatcaccatggaccctcatgataattttgtttctttcactttctactctgttgacaaccattgtctcctcttattttcttttcattttctgtaactttttcgttaaactttagcttgcatttgtaacgaatttttaaattcacttttgtttatttgtcagattgtaagtactttctctaatcacttttttttcaaggcaatcagggtatattatattgtacttcagcacagttttagagaacaattgttataattaaatgataaggtagaatatttctgcatataaattctggctggcgtggaaatattcttattggtagaaacaactacatcctggtcatcatcctgcctttctctttatggttacaatgatatacactgtttgagatgaggataaaatactctgagtccaaaccgggcccctctgctaaccatgttcatgccttcttctttttcctacagctcctgggcaacgtgctggttattgtgctgtctcatcattttggcaaagaattgtaatacgactcactatagggcgaattcggatcccccggtagttaattaatacgcgtcactatgaagtgcctgctgtacctggccttcctgttcatcggcgtgaactgcaagcaggtgaagctgcaggagagcggcggcggcctggtgcagcccggcggcagcctgcgcctgagctgcgccgccagcggcttcaccttcgacagctacgccatgagctgggtgcgccaggcccccggcaagggcctggagtgggtgagctacatcaccagcagcagcagcaccatctactacgtggacagcgtgaagggccgcttcaccatcagccgcgacaacgccaagaacagcctgtacctgcagatgaacagcctgcgcgacgaggacaccgccgtgtactactgcgcccgcctgcgcaacagcgagggctactggtacttcgacctgtggggccgcggcaccctggtgaccgtgagcagcggcggcggcggcagcggcggcggcggcagcggcggcggcggcagccagagcgccctgacccaggaccccgccgtgagcgtggccctgggccagaccgtgcgcatcacctgccagggcgacagcctgcgcagctacttcgccagctggtaccagcagaagcccggccaggcccccctgctggtgatgtacggccagaacatccgccccagcggcatccccgaccgcttcagcggcagcagcagcggcaacagcgccagcctgaccatcaccggcgcccaggccgaggacgaggccgactactactgcaacagccgcgacagcagctacaaccactgggtgttcggcggcggcaccaagctgaccgtgctgggcgcggccgcaagtggtggttctggaggcggtggaagtggtggcggaggtagtgggcccaagttcacgatcgtttttccacacaaccaaaaaggaaactggaaaaatgttccttctaattaccattattgcccgtcaagctcagatttaaattggcataatgacttaataggcacagccttacaagtcaaaatgccccagagtcacaaggctattcaagcagacggttggatgtgtcatgcttccaaatgggtcactacttgtgatttccgctggtatggaccgaagtatataacacattccatccgatccttcactccatctgtagaacaatgcaaggaaagcattgaacaaacgaaacaaggaacttggctgaatccaggcttccctcctcaaagttgtggatatgcaactgtgacggatgccgaagcagtgattgtccaggtgactcctcaccatgtgctggttgatgaatacacaggagaatgggttgattcacagttcatcaacggaaaatgcagcaattacatatgccccactgtccataactctacaacctggcattctgactataaggtcaaagggctatgtgattctaacctcatttccatggacatcaccttcttctcagaggacggagagctatcatccctgggaaaggagggcacagggttcagaagtaaccaatttgcttatgaaactggaggcaaggcctgcaaaatgcaatactgcaagcattggggagtcagactcccatcaggtgtctggttcgagatggctgataaggatctctttgctgcagccagattccctgaatgcccagaagggtcaagtatctctgctccatctcagacctcagtggatgtaagtctaattcaggacgttgagaggatcttggattattccctctgccaagaaacctggagcaaaatcagagcgggtcttccaatctctccagtggatctcagctatcttgctcctaaaaacccaggaaccggtcctgctttcaccataatcaatggtaccctaaaatactttgagaccagatacatcagagtcgatattgctgctccaatcctctcaagaatggtcggaatgatctccggaactaccacagaacaggaactgtgggatgactgggcgccatatgaagacgtggaaattggacccaatggagttctgaggaccagttcaggatataagtttcctttatacatgattggacatggtatgttggactccgatcttcatcttagctcaaaggctcaggtgttcgaacatcctcacattcaagacgctgcttcgcaacttcctgatgatgagagtttattttttggtgatactgggctatccaaaaatccaatcgagcttgtagaaggttggttcagtagttggaaaagctctattgcctcttttttctttatcatagggttaatcattggactattcttggttctccgagttggtatccatctttgcattaaattaaagcacaccaagaaaagacagatttatacagacatagagatgaaccgacttggaaagtaactcaaatcctgctaggtatgaaaaaaactaacagatatcacgcctaggactagtgtgaaatagacatcagaattaagaaaaacgtagggtccaagtggttccccgttatggactcgctatctgtcaaccagatcttataccctgaagttcacctagatagcccgatagttaccaataagatagtagccatcctggagtatgctcgactgtttaaacctgcaggcatgcaagctgatctttttccctctgccaaaaattatggggacatcatgaagccccttgagcatctgacttctggctaataaaggaaatttattttcattgcaatagtgtgttggaattttttgtgtctctcactcggaaggacatatgggagggcaaatcatttaaaacatcagaatgagtatttggtttagagtttggcaacatatgcccatatgctggctgccatgaacaaaggttggctataaagaggtcatcagtatatgaaacagccccctgctgtccattccttattccatagaaaagccttgacttgaggttagattttttttatattttgttttgtgttatttttttctttaacatccctaaaattttccttacatgttttactagccagatttttcctcctctcctgactactcccagtcatagctgtccctcttctcttatggagatccctcgaggagctttttgcaaaagcctaggcctccaaaaaagcctcttcactacttctggaatagctcagaagccgaggcggcctcggcctctgcataaataaaaaaaattagtcagccatggggcggagaatgggcggaactgggcggagttaggggcgggatgggcggagttaggggcgggactatggttgctgactaattgctgcattaatgaatcggccaacgcgcggggagaggcggtttgcgtattgggcgctcttccgcttcctcgctcactgactcgctgcgctcggtcgttcggctgcggcgagcggtatcagctcactcaaaggcggtaatacggttatccacagaatcaggggataacgcaggaaagaacatgtgagcaaaaggccagcaaaaggccaggaaccgtaaaaaggccgcgttgctggcgtttttccataggctccgcccccctgacgagcatcacaaaaatcgacgctcaagtcagaggtggcgaaacccgacaggactataaagataccaggcgtttccccctggaagctccctcgtgcgctctcctgttccgaccctgccgcttaccggatacctgtccgcctttctcccttcgggaagcgtggcgctttctcatagctcacgctgtaggtatctcagttcggtgtaggtcgttcgctccaagctgggctgtgtgcacgaaccccccgttcagcccgaccgctgcgccttatccggtaactatcgtcttgagtccaacccggtaagacacgacttatcgccactggcagcagccactggtaacaggattagcagagcgaggtatgtaggcggtgctacagagttcttgaagtggtggcctaactacggctacactagaagaacagtatttggtatctgcgctctgctgaagccagttaccttcggaaaaagagttggtagctcttgatccggcaaacaaaccaccgctggtagcggtggtttttttgtttgcaagcagcagattacgcgcagaaaaaaaggatctcaagaagatcctttgatcttttctacggggtctgacgctcagtggaacgaaaactcacgttaagggattttggtcatgagattatcaaaaaggatcttcacctagatccttttaaattaaaaatgaagttttaaatcaatctaaagtatatatgagtaaacttggtctgacagttaccaatgcttaatcagtgaggcacctatctcagcgatctgtctatttcgttcatccatagttgcctgactccccgtcgtgtagataactacgatacgggagggcttaccatctggccccagtgctgcaatgataccgcgagacccacgctcaccggctccagatttatcagcaataaaccagccagccggaagggccgagcgcagaagtggtcctgcaactttatccgcctccatccagtctattaattgttgccgggaagctagagtaagtagttcgccagttaatagtttgcgcaacgttgttgccattgctacaggcatcgtggtgtcacgctcgtcgtttggtatggcttcattcagctccggttcccaacgatcaaggcgagttacatgatcccccatgttgtgcaaaaaagcggttagctccttcggtcctccgatagttgtcagaagtaagttggccgcagtgttatcactcatggttatggcagcactgcataattctcttactgtcatgccatccgtaagatgcttttctgtgactggtgagtactcaaccaagtcattctgagaatagtgtatgcggcgaccgagttgctcttgcccggcgtcaatacgggataataccgcgccacatagcagaactttaaaagtgctcatcattggaaaacgttcttcggggcgaaaactctcaaggatcttaccgctgttgagatccagttcgatgtaacccactcgtgcacccaactgatcttcagcatcttttactttcaccagcgtttctgggtgagcaaaaacaggaaggcaaaatgccgcaaaaaagggaataagggcgacacggaaatgttgaatactcatactcttcctttttcaatattattgaagcatttatcagggttattgtctcatgagcggatacatatttgaatgtatttagaaaaataaacaaataggggttccgcgcacatttccccgaaaagtgccacctgacgtctaagaaaccattattatcatgacattaacctataaaaataggcgtatcacgaggccctttcgtctcgcgcgtttcggtgatgacggtgaaaacctctgacacatgcagctcccggagacggtcacagcttgtctgtaagcggatgccgggagcagacaagcccgtcagggcgcgtcagcgggtgttggcgggtgtcggggctggcttaactatgcggcatcagagcagattgtactgagagtgcaccattcgacgctctcccttatgcgactcctgcattaggaagcagcccagtagtaggttgaggccgttgagcaccgccgccgcaaggaatggtctggcttatcgaaattaatacgactcactatagggagacc

SEQ ID NO: 206 - DNA, 6284 bp, synthetic construct
  source 1..6284: mol_type = other DNA
ggaattcgagctcgccccgttacataacttacggtaaatggcccgcctggctgaccgcccaacgacccccgcccattgacgtcaataatgacgtatgttcccatagtaacgccaatagggactttccattgacgtcaatgggtggagtatttacggtaaactgcccacttggcagtacatcaagtgtatcatatgccaagtacgccccctattgacgtcaatgacggtaaatggcccgcctggcattatgcccagtacatgaccttatgggactttcctacttggcagtacatctacgtattagtcatcgctattaccatggtgatgcggttttggcagtacatcaatgggcgtggatagcggtttgactcacggggatttccaagtctccaccccattgacgtcaatgggagtttgttttggcaccaaaatcaacgggactttccaaaatgtcgtaacaactccgccccattgacgcaaatgggcggtaggcgtgtacggtgggaggtctatataagcagagctcgtttagtgaaccgtcagatcgcctggagacgccatccacgctgttttgacctccatagaagacaccgggaccgatccagcctccgggggatcgatccccccgatcctgagaacttcagggtgagtttggggacccttgattgttctttctttttcgctattgtaaaattcatgttatatggagggggcaaagttttcagggtgttgtttagaatgggaagatgtcccttgtatcaccatggaccctcatgataattttgtttctttcactttctactctgttgacaaccattgtctcctcttattttcttttcattttctgtaactttttcgttaaactttagcttgcatttgtaacgaatttttaaattcacttttgtttatttgtcagattgtaagtactttctctaatcacttttttttcaaggcaatcagggtatattatattgtacttcagcacagttttagagaacaattgttataattaaatgataaggtagaatatttctgcatataaattctggctggcgtggaaatattcttattggtagaaacaactacatcctggtcatcatcctgcctttctctttatggttacaatgatatacactgtttgagatgaggataaaatactctgagtccaaaccgggcccctctgctaaccatgttcatgccttcttctttttcctacagctcctgggcaacgtgctggttattgtgctgtctcatcattttggcaaagaattgtaatacgactcactatagggcgaattcggatcccccggtagttaattaatacgcgtcactatgaagtgccttttgtacttagcctttttattcattggggtgaattgcaagaactcctattcagagtgtccgccgtcctacgatggatattgcctccacgacggggtttgccgctacattgaagcgctcgactcctatgcctgtaattgtgtcgtgggctacgctggtgaacgatgccaatacagggacttgagatggtggggccgaaggaagttcacgatcgtttttccacagaaccaaaaaggaaactggaaaaatgttccttctaattaccattattgcccgtcaagctcagatttaaattggcataatgacttaataggcacagccttacaagtcaaaatgccccagagtcacaaggctattcaagcagacggttggatgtgtcatgcttccaaatgggtcactacttgtgatttccgctggtatggaccgaagtatataacacattccatccgatccttcactccatctgtagaacaatgcaaggaaagcattgaacaaacgaaacaaggaacttggctgaatccaggcttccctcctcaaagttgtggatatgcaactgtgacggatgccgaagcagtgattgtccaggtgactcctcaccatgtgctggttgatgaatacacaggagaatgggttgattcacagttcatcaacggaaaatgcagcaattacatatgccccactgtccataactctacaacctggcattctgactataaggtcaaagggctatgtgattctaacctcatttccatggacatcaccttcttctcagaggacggagagctatcatccctgggaaaggagggcacagggttcagaagtaactactttgcttatgaaactggaggcaaggcctgcaaaatgcaatactgcaagcattggggagtcagactcccatcaggtgtctggttcgagatggctgataaggatctctttgctgcagccagattccctgaatgcccagaagggtcaagtatctctgctccatctcagacctcagtggatgtaagtctaattcaggacgttgagaggatcttggattattccctctgccaagaaacctggagcaaaatcagagcgggtcttccaatctctccagtggatctcagctatcttgctcctaaaaacccaggaaccggtcctgctttcaccataatcaatggtaccctaaaatactttgagaccagatacatcagagtcgatattgctgctccaatcctctcaagaatggtcggaatgatctccggaactaccacagaacaggaactgtgggatgactgggcgccatatgaagacgtggaaattggacccaatggagttctgaggaccagttcaggatataagtttcctttatacatgattggacatggtatgttggactccgatcttcatcttagctcaaaggctcaggtgttcgaacatcctcacattcaagacgctgcttcgcaacttcctgatgatgagagtttattttttggtgatactgggctatccaaaaatccaatcgagcttgtagaaggttggttcagtagttggaaaagctctattgcctcttttttctttatcatagggttaatcattggactattcttggttctccgagttggtatccatctttgcattaaattaaagcacaccaagaaaagacagatttatacagacatagagatgaaccgacttggaaagtaactcaaatcctgctaggtatgaaaaaaactaacagatatcacgcctaggactagtgtgaaatagacatcagaattaagaaaaacgtagggtccaagtggttccccgttatggactcgctatctgtcaaccagatcttataccctgaagttcacctagatagcccgatagttaccaataagatagtagccatcctggagtatgctcgactgtttaaacctgcaggcatgcaagctgatctttttccctctgccaaaaattatggggacatcatgaagccccttgagcatctgacttctggctaataaaggaaatttattttcattgcaatagtgtgttggaattttttgtgtctctcactcggaaggacatatgggagggcaaatcatttaaaacatcagaatgagtatttggtttagagtttggcaacatatgcccatatgctggctgccatgaacaaaggttggctataaagaggtcatcagtatatgaaacagccccctgctgtccattccttattccatagaaaagccttgacttgaggttagattttttttatattttgttttgtgttatttttttctttaacatccctaaaattttccttacatgttttactagccagatttttcctcctctcctgactactcccagtcatagctgtccctcttctcttatggagatccctcgaggagctttttgcaaaagcctaggcctccaaaaaagcctcttcactacttctggaatagctcagaagccgaggcggcctcggcctctgcataaataaaaaaaattagtcagccatggggcggagaatgggcggaactgggcggagttaggggcgggatgggcggagttaggggcgggactatggttgctgactaattgctgcattaatgaatcggccaacgcgcggggagaggcggtttgcgtattgggcgctcttccgcttcctcgctcactgactcgctgcgctcggtcgttcggctgcggcgagcggtatcagctcactcaaaggcggtaatacggttatccacagaatcaggggataacgcaggaaagaacatgtgagcaaaaggccagcaaaaggccaggaaccgtaaaaaggccgcgttgctggcgtttttccataggctccgcccccctgacgagcatcacaaaaatcgacgctcaagtcagaggtggcgaaacccgacaggactataaagataccaggcgtttccccctggaagctccctcgtgcgctctcctgttccgaccctgccgcttaccggatacctgtccgcctttctcccttcgggaagcgtggcgctttctcatagctcacgctgtaggtatctcagttcggtgtaggtcgttcgctccaagctgggctgtgtgcacgaaccccccgttcagcccgaccgctgcgccttatccggtaactatcgtcttgagtccaacccggtaagacacgacttatcgccactggcagcagccactggtaacaggattagcagagcgaggtatgtaggcggtgctacagagttcttgaagtggtggcctaactacggctacactagaagaacagtatttggtatctgcgctctgctgaagccagttaccttcggaaaaagagttggtagctcttgatccggcaaacaaaccaccgctggtagcggtggtttttttgtttgcaagcagcagattacgcgcagaaaaaaaggatctcaagaagatcctttgatcttttctacggggtctgacgctcagtggaacgaaaactcacgttaagggattttggtcatgagattatcaaaaaggatcttcacctagatccttttaaattaaaaatgaagttttaaatcaatctaaagtatatatgagtaaacttggtctgacagttaccaatgcttaatcagtgaggcacctatctcagcgatctgtctatttcgttcatccatagttgcctgactccccgtcgtgtagataactacgatacgggagggcttaccatctggccccagtgctgcaatgataccgcgagacccacgctcaccggctccagatttatcagcaataaaccagccagccggaagggccgagcgcagaagtggtcctgcaactttatccgcctccatccagtctattaattgttgccgggaagctagagtaagtagttcgccagttaatagtttgcgcaacgttgttgccattgctacaggcatcgtggtgtcacgctcgtcgtttggtatggcttcattcagctccggttcccaacgatcaaggcgagttacatgatcccccatgttgtgcaaaaaagcggttagctccttcggtcctccgatagttgtcagaagtaagttggccgcagtgttatcactcatggttatggcagcactgcataattctcttactgtcatgccatccgtaagatgcttttctgtgactggtgagtactcaaccaagtcattctgagaatagtgtatgcggcgaccgagttgctcttgcccggcgtcaatacgggataataccgcgccacatagcagaactttaaaagtgctcatcattggaaaacgttcttcggggcgaaaactctcaaggatcttaccgctgttgagatccagttcgatgtaacccactcgtgcacccaactgatcttcagcatcttttactttcaccagcgtttctgggtgagcaaaaacaggaaggcaaaatgccgcaaaaaagggaataagggcgacacggaaatgttgaatactcatactcttcctttttcaatattattgaagcatttatcagggttattgtctcatgagcggatacatatttgaatgtatttagaaaaataaacaaataggggttccgcgcacatttccccgaaaagtgccacctgacgtctaagaaaccattattatcatgacattaacctataaaaataggcgtatcacgaggccctttcgtctcgcgcgtttcggtgatgacggtgaaaacctctgacacatgcagctcccggagacggtcacagcttgtctgtaagcggatgccgggagcagacaagcccgtcagggcgcgtcagcgggtgttggcgggtgtcggggctggcttaactatgcggcatcagagcagattgtactgagagtgcaccattcgacgctctcccttatgcgactcctgcattaggaagcagcccagtagtaggttgaggccgttgagcaccgccgccgcaaggaatggtctggcttatcgaaattaatacgactcactatagggagacc

SEQ ID NO: 207 - DNA, 6677 bp, synthetic construct
  source 1..6677: mol_type = other DNA
ggaattcgagctcgccccgttacataacttacggtaaatggcccgcctggctgaccgcccaacgacccccgcccattgacgtcaataatgacgtatgttcccatagtaacgccaatagggactttccattgacgtcaatgggtggagtatttacggtaaactgcccacttggcagtacatcaagtgtatcatatgccaagtacgccccctattgacgtcaatgacggtaaatggcccgcctggcattatgcccagtacatgaccttatgggactttcctacttggcagtacatctacgtattagtcatcgctattaccatggtgatgcggttttggcagtacatcaatgggcgtggatagcggtttgactcacggggatttccaagtctccaccccattgacgtcaatgggagtttgttttggcaccaaaatcaacgggactttccaaaatgtcgtaacaactccgccccattgacgcaaatgggcggtaggcgtgtacggtgggaggtctatataagcagagctcgtttagtgaaccgtcagatcgcctggagacgccatccacgctgttttgacctccatagaagacaccgggaccgatccagcctccgggggatcgatccccccgatcctgagaacttcagggtgagtttggggacccttgattgttctttctttttcgctattgtaaaattcatgttatatggagggggcaaagttttcagggtgttgtttagaatgggaagatgtcccttgtatcaccatggaccctcatgataattttgtttctttcactttctactctgttgacaaccattgtctcctcttattttcttttcattttctgtaactttttcgttaaactttagcttgcatttgtaacgaatttttaaattcacttttgtttatttgtcagattgtaagtactttctctaatcacttttttttcaaggcaatcagggtatattatattgtacttcagcacagttttagagaacaattgttataattaaatgataaggtagaatatttctgcatataaattctggctggcgtggaaatattcttattggtagaaacaactacatcctggtcatcatcctgcctttctctttatggttacaatgatatacactgtttgagatgaggataaaatactctgagtccaaaccgggcccctctgctaaccatgttcatgccttcttctttttcctacagctcctgggcaacgtgctggttattgtgctgtctcatcattttggcaaagaattgtaatacgactcactatagggcgaattcggatcccccggtagttaattaatacgcgtcactatgaagtgccttttgtacttagcctttttattcattggggtgaattgcaaggagggcatctgccgcaaccgcgtgaccaacaacgtgaaggacgtgaccaagctggtggccaacctgcccaaggactacatgatcaccctgaagtacgtgcccggcatggacgtgctgcccagccactgctggatcagcgagatggtggtgcagctgtcggacagcctgaccgacctgctggacaagttcagcaacatcagcgagggcctgagcaactacagcatcatcgacaagctggtgaacatcgtggacgacctggtggagtgcgtgaaggagaacagcagcaaggacctgaagaagagcttcaagagccccgagccccgcctgttcacccccgaggagttcttccgcatcttcaaccgcagcatcgacgccttcaaggacttcgtggtggccagcgagaccagcgactgcgtggtgagcagcaccctgagccccgagaaggacagccgcgtgagcgtgaccaagcccttcatgctgccccccgtggccgccgcggccgcaagtggtggttctggaggcggtggaagtggtggcggaggtagtgggcccaagttcacgatcgtttttccacacaaccaaaaaggaaactggaaaaatgttccttctaattaccattattgcccgtcaagctcagatttaaattggcataatgacttaataggcacagccttacaagtcaaaatgccccagagtcacaaggctattcaagcagacggttggatgtgtcatgcttccaaatgggtcactacttgtgatttccgctggtatggaccgaagtatataacacattccatccgatccttcactccatctgtagaacaatgcaaggaaagcattgaacaaacgaaacaaggaacttggctgaatccaggcttccctcctcaaagttgtggatatgcaactgtgacggatgccgaagcagtgattgtccaggtgactcctcaccatgtgctggttgatgaatacacaggagaatgggttgattcacagttcatcaacggaaaatgcagcaattacatatgccccactgtccataactctacaacctggcattctgactataaggtcaaagggctatgtgattctaacctcatttccatggacatcaccttcttctcagaggacggagagctatcatccctgggaaaggagggcacagggttcagaagtaaccaatttgcttatgaaactggaggcaaggcctgcaaaatgcaatactgcaagcattggggagtcagactcccatcaggtgtctggttcgagatggctgataaggatctctttgctgcagccagattccctgaatgcccagaagggtcaagtatctctgctccatctcagacctcagtggatgtaagtctaattcaggacgttgagaggatcttggattattccctctgccaagaaacctggagcaaaatcagagcgggtcttccaatctctccagtggatctcagctatcttgctcctaaaaacccaggaaccggtcctgctttcaccataatcaatggtaccctaaaatactttgagaccagatacatcagagtcgatattgctgctccaatcctctcaagaatggtcggaatgatctccggaactaccacagaacaggaactgtgggatgactgggcgccatatgaagacgtggaaattggacccaatggagttctgaggaccagttcaggatataagtttcctttatacatgattggacatggtatgttggactccgatcttcatcttagctcaaaggctcaggtgttcgaacatcctcacattcaagacgctgcttcgcaacttcctgatgatgagagtttattttttggtgatactgggctatccaaaaatccaatcgagcttgtagaaggttggttcagtagttggaaaagctctattgcctcttttttctttatcatagggttaatcattggactattcttggttctccgagttggtatccatctttgcattaaattaaagcacaccaagaaaagacagatttatacagacatagagatgaaccgacttggaaagtaactcaaatcctgctaggtatgaaaaaaactaacagatatcacgcctaggactagtgtgaaatagacatcagaattaagaaaaacgtagggtccaagtggttccccgttatggactcgctatctgtcaaccagatcttataccctgaagttcacctagatagcccgatagttaccaataagatagtagccatcctggagtatgctcgactgtttaaacctgcaggcatgcaagctgatctttttccctctgccaaaaattatggggacatcatgaagccccttgagcatctgacttctggctaataaaggaaatttattttcattgcaatagtgtgttggaattttttgtgtctctcactcggaaggacatatgggagggcaaatcatttaaaacatcagaatgagtatttggtttagagtttggcaacatatgcccatatgctggctgccatgaacaaaggttggctataaagaggtcatcagtatatgaaacagccccctgctgtccattccttattccatagaaaagccttgacttgaggttagattttttttatattttgttttgtgttatttttttctttaacatccctaaaattttccttacatgttttactagccagatttttcctcctctcctgactactcccagtcatagctgtccctcttctcttatggagatccctcgaggagctttttgcaaaagcctaggcctccaaaaaagcctcttcactacttctggaatagctcagaagccgaggcggcctcggcctctgcataaataaaaaaaattagtcagccatggggcggagaatgggcggaactgggcggagttaggggcgggatgggcggagttaggggcgggactatggttgctgactaattgctgcattaatgaatcggccaacgcgcggggagaggcggtttgcgtattgggcgctcttccgcttcctcgctcactgactcgctgcgctcggtcgttcggctgcggcgagcggtatcagctcactcaaaggcggtaatacggttatccacagaatcaggggataacgcaggaaagaacatgtgagcaaaaggccagcaaaaggccaggaaccgtaaaaaggccgcgttgctggcgtttttccataggctccgcccccctgacgagcatcacaaaaatcgacgctcaagtcagaggtggcgaaacccgacaggactataaagataccaggcgtttccccctggaagctccctcgtgcgctctcctgttccgaccctgccgcttaccggatacctgtccgcctttctcccttcgggaagcgtggcgctttctcatagctcacgctgtaggtatctcagttcggtgtaggtcgttcgctccaagctgggctgtgtgcacgaaccccccgttcagcccgaccgctgcgccttatccggtaactatcgtcttgagtccaacccggtaagacacgacttatcgccactggcagcagccactggtaacaggattagcagagcgaggtatgtaggcggtgctacagagttcttgaagtggtggcctaactacggctacactagaagaacagtatttggtatctgcgctctgctgaagccagttaccttcggaaaaagagttggtagctcttgatccggcaaacaaaccaccgctggtagcggtggtttttttgtttgcaagcagcagattacgcgcagaaaaaaaggatctcaagaagatcctttgatcttttctacggggtctgacgctcagtggaacgaaaactcacgttaagggattttggtcatgagattatcaaaaaggatcttcacctagatccttttaaattaaaaatgaagttttaaatcaatctaaagtatatatgagtaaacttggtctgacagttaccaatgcttaatcagtgaggcacctatctcagcgatctgtctatttcgttcatccatagttgcctgactccccgtcgtgtagataactacgatacgggagggcttaccatctggccccagtgctgcaatgataccgcgagacccacgctcaccggctccagatttatcagcaataaaccagccagccggaagggccgagcgcagaagtggtcctgcaactttatccgcctccatccagtctattaattgttgccgggaagctagagtaagtagttcgccagttaatagtttgcgcaacgttgttgccattgctacaggcatcgtggtgtcacgctcgtcgtttggtatggcttcattcagctccggttcccaacgatcaaggcgagttacatgatcccccatgttgtgcaaaaaagcggttagctccttcggtcctccgatagttgtcagaagtaagttggccgcagtgttatcactcatggttatggcagcactgcataattctcttactgtcatgccatccgtaagatgcttttctgtgactggtgagtactcaaccaagtcattctgagaatagtgtatgcggcgaccgagttgctcttgcccggcgtcaatacgggataataccgcgccacatagcagaactttaaaagtgctcatcattggaaaacgttcttcggggcgaaaactctcaaggatcttaccgctgttgagatccagttcgatgtaacccactcgtgcacccaactgatcttcagcatcttttactttcaccagcgtttctgggtgagcaaaaacaggaaggcaaaatgccgcaaaaaagggaataagggcgacacggaaatgttgaatactcatactcttcctttttcaatattattgaagcatttatcagggttattgtctcatgagcggatacatatttgaatgtatttagaaaaataaacaaataggggttccgcgcacatttccccgaaaagtgccacctgacgtctaagaaaccattattatcatgacattaacctataaaaataggcgtatcacgaggccctttcgtctcgcgcgtttcggtgatgacggtgaaaacctctgacacatgcagctcccggagacggtcacagcttgtctgtaagcggatgccgggagcagacaagcccgtcagggcgcgtcagcgggtgttggcgggtgtcggggctggcttaactatgcggcatcagagcagattgtactgagagtgcaccattcgacgctctcccttatgcgactcctgcattaggaagcagcccagtagtaggttgaggccgttgagcaccgccgccgcaaggaatggtctggcttatcgaaattaatacgactcactatagggagacc

SEQ ID NO: 208 - protein, 20 aa, synthetic construct
RAAASGGSGGGGSGGGGSGP

SEQ ID NO: 209 - protein, 495 aa, synthetic construct
KFTIVFPHNQKGNWKNVPSNYHYCPSSSDLNWHNDLIGTAIQVKMPKSHKAIQADGWMCHASKWVTTCDFRWYGPKYITQSIRSFTPSVEQCKESIEQTKQGTWLNPGFPPQSCGYATVTDAEAVIVQVTPHHVLVDEYTGEWVDSQFINGKCSNYICPTVHNSTTWHSDYKVKGLCDSNLISMDITFFSEDGELSSLGKEGTGFRSNYFAYETGGKACKMQYCKHWGVRLPSGVWFEMADKDLFAAARFPECPEGSSISAPSQTSVDVSLIQDVERILDYSLCQETWSKIRAGLPISPVDLSYLAPKNPGTGPAFTIINGTLKYFETRYIRVDIAAPILSRMVGMISGTTTERELWDDWAPYEDVEIGPNGVLRTSSGYKFPLYMIGHGMLDSDLHLSSKAQVFEHPHIQDAASQLPDDESLFFGDTGLSKNPIELVEGWFSSWKSSIASFFFIIGLIIGLFLVLRVGIHLCIKLKHTKKRQIYTDIEMNRLGK

SEQ ID NO: 210 - protein, 511 aa, synthetic construct
MKCLLYLAFLFIGVNCKFTIVFPHNQKGNWKNVPSNYHYCPSSSDLNWHNDLIGTAIQVKMPKSHKAIQADGWMCHASKWVTTCDFRWYGPKYITQSIRSFTPSVEQCKESIEQTKQGTWLNPGFPPQSCGYATVTDAEAVIVQVTPHHVLVDEYTGEWVDSQFINGKCSNYICPTVHNSTTWHSDYKVKGLCDSNLISMDITFFSEDGELSSLGKEGTGFRSNYFAYETGGKACKMQYCKHWGVRLPSGVWFEMADKDLFAAARFPECPEGSSISAPSQTSVDVSLIQDVERILDYSLCQETWSKIRAGLPISPVDLSYLAPKNPGTGPAFTIINGTLKYFETRYIRVDIAAPILSRMVGMISGTTTERELWDDWAPYEDVEIGPNGVLRTSSGYKFPLYMIGHGMLDSDLHLSSKAQVFEHPHIQDAASQLPDDESLFFGDTGLSKNPIELVEGWFSSWKSSIASFFFIIGLIIGLFLVLRVGIHLCIKLKHTKKRQIYTDIEMNRLGK

SEQ ID NO: 211 - protein, 496 aa, synthetic construct
KFTIVFPHHQKGNWKNVPSTYHYCPSSSDQNWHNDLTGVSLHVKIPKSHKAIQADGWMCHAAKWVTTCDFRWYGPKYITHSIHSMSPTLEQCKTSIEQTKQGVWINPGFPPQSCGYATVTDAEVVVVQATPHHVLVDEYTGEWIDSQLVGGKCSKEVCQTVHNSTVWHADYKITGLCESNLASVDITFFSEDGQKTSLGKPNTGFRSNHFAYESGEKACRMQYCTQWGIRLPSGVWFELVDKDLFQAAKLPECPRGSSISAPSQTSVDVSLIQDVERILDYSLCQETWSKIRAKLPVSPVDLSYLAPKNPGSGPAFTIINGTLKYFETRYIRVDISNPIIPHMVGTMSGTTTERELWNDWYPYEDVEIGPNGVLKTPTGFKFPLYMIGHGMLDSDLHKSSQAQVFEHPHAKDAASQLPDDETLFFGDTGLSKNPVELVEGWFSSWKSTLASFFLIIGLGVALIFIIRIIVAIRYKYKGRKTQKIYNDVEMSRLGNK

SEQ ID NO: 212 - protein, 512 aa, synthetic construct
MLRLFLFCFLALGAHSKFTIVFPHHQKGNWKNVPSTYHYCPSSSDQNWHNDLTGVSLHVKIPKSHKAIQADGWMCHAAKWVTTCDFRWYGPKYITHSIHSMSPTLEQCKTSIEQTKQGVWINPGFPPQSCGYATVTDAEVVVVQATPHHVLVDEYTGEWIDSQLVGGKCSKEVCQTVHNSTVWHADYKITGLCESNLASVDITFFSEDGQKTSLGKPNTGFRSNHFAYESGEKACRMQYCTQWGIRLPSGVWFELVDKDLFQAAKLPECPRGSSISAPSQTSVDVSLIQDVERILDYSLCQETWSKIRAKLPVSPVDLSYLAPKNPGSGPAFTIINGTLKYFETRYIRVDISNPIIPHMVGTMSGTTTERELWNDWYPYEDVEIGPNGVLKTPTGFKFPLYMIGHGMLDSDLHKSSQAQVFEHPHAKDAASQLPDDETLFFGDTGLSKNPVELVEGWFSSWKSTLASFFLIIGLGVALIFIIRIIVAIRYKYKGRKTQKIYNDVEMSRLGNK

SEQ ID NO: 213 - protein, 517 aa, synthetic construct
MLSYLIFALVVSPILGKIEIVFPQHTTGDWKRVPHEYNYCPTSADKNSHGTQTGIPVELTMPKGLTTHQVDGFMCHSALWMTTCDFRWYGPKYITHSIHNEEPTDYQCLEAIKAYKDGVSFNPGFPPQSCGYGTVTDAEAHIVTVTPHSVKVDEYTGEWIDPHFIGGRCKGQICETVHNSTKWFTSSDGESVCSQLFTLVGGTFFSDSEEITSMGLPETGIRSNYFPYVSTEGICKMPFCRKPGYKLKNDLWFQITDPDLDKTVRDLPHIKDCDLSSSIVTPGEHATDISLISDVERILDYALCQNTWSKIEAGEPITPVDLSYLGPKNPGAGPVFTIINGSLHYFMSKYLRVELESPVIPRMEGKVAGTRIVRQLWDQWFPFGEVEIGPNGVLKTKQGYKFPLHIIGTGEVDNDIKMERIVKHWEHPHIEAAQTFLKKDDTEEVLYYGDTGVSKNPVELVEGWFSGWRSSIMGVLAVIIGFVILIFLIRLIGVLSSLFRQKRRPIYKSDVEMAHFR

SEQ ID NO: 214 - protein, 523 aa, synthetic construct
MKMKMVIAGLILCIGILPAIGKITISFPQSLKGDWRPVPKGYNYCPTSADKNLHGDLIDIGLRLRAPKSFKGISADGWMCHAARWITTCDFRWYGPKYITHSIHSFRPSNDQCKEAIRLTNEGNWINPGFPPQSCGYASVTDSESVVVTVTKHQVLVDEYSGSWIDSQFPGGSCTSPICDTVHNSTLWHADHTLDSICDQEFVAMDAVLFTESGKFEEFGKPNSGIRSNYFPYESLKDVCQMDFCKRKGFKLPSGVWFEIEDAEKSHKAQVELKIKRCPHGAVISAPNQNAADINLIMDVERILDYSLCQATWSKIQNKEALTPIDISYLGPKNPGPGPAFTIINGTLHYFNTRYIRVDIAGPVTKEITGFVSGTSTSRVLWDQWFPYGENSIGPNGLLKTASGYKYPLFMVGTGVLDADIHKLGEATVIEHPHAKEAQKVVDDSEVIFFGDTGVSKNPVEVVEGWFSGWRSSLMSIFGIILLIVCLVLIVRILIALKYCCVRHKKRTIYKEDLEMGRIPRRA

SEQ ID NO: 215 - protein, 511 aa, synthetic construct
MTPAFILCMLLAGSSWAKFTIVFPQSQKGDWKDVPPNYRYCPSSADQNWHGDLLGVNIRAKMPKVHKAIKADGWMCHAAKWVTTCDYRWYGPQYITHSIHSFIPTKAQCEESIKQTKEGVWINPGFPPKNCGYASVSDAESIIVQATAHSVMIDEYSGDWLDSQFPTGRCTGSTCETIHNSTLWYADYQVTGLCDSALVSTEVTFYSEDGLMTSIGRQNTGYRSNYFPYEKGAAACRMKYCTHEGIRLPSGVWFEMVDKELLESVQMPECPAGLTISAPTQTSVDVSLILDVERMLDYSLCQETWSKVHSGLPISPVDLGYIAPKNPGAGPAFTIVNGTLKYFDTRYLRIDIEGPVLKKMTGKVSGTPTKRELWTEWFPYDDVEIGPNGVLKTPEGYKFPLYMIGHGLLDSDLQKTSQAEVFHHPQIAEAVQKLPDDETLFFGDTGISKNPVEVIEGWFSNWRSSVMAIVFAILLLVITVLMVRLCVAFRHFCCQKRHKIYNDLEMNQLRR

SEQ ID NO: 216 - protein, 512 aa, synthetic construct
MNFLLLTFIVLPLCSHAKFSIVFPQSQKGNWKNVPSSYHYCPSSSDQNWHNDLLGITMKVKMPKTHKAIQADGWMCHAAKWITTCDFRWYGPKYITHSIHSIQPTSEQCKESIKQTKQGTWMSPGFPPQNCGYATVTDSVAVVVQATPHHVLVDEYTGEWIDSQFPNGKCETEECETVHNSTVWYSDYKVTGLCDATLVDTEITFFSEDGKKESIGKPNTGYRSNYFAYEKGDKVCKMNYCKHAGVRLPSGVWFEFVDQDVYAAAKLPECPVGATISAPTQTSVDVSLILDVERILDYSLCQETWSKIRSKQPVSPVDLSYLAPKNPGTGPAFTIINGTLKYFETRYIRIDIDNPIISKMVGKISGSQTERELWTEWFPYEGVEIGPNGILKTPTGYKFPLFMIGHGMLDSDLHKTSQAEVFEHPHLAEAPKQLPEEETLFFGDTGISKNPVELIEGWFSSWKSTVVTFFFAIGVFILLYVVARIVIAVRYRYQGSNNKRIYNDIEMSRFRK

SEQ ID NO: 217 - protein, 496 aa, synthetic construct
KFTIVFPHNQKGNWKNVPANYQYCPSSSDLNWHNGLIGTSLQVKMPKSHKAIQADGWMCHAAKWVTTCDFRWYGPKYVTHSIKSMIPTVDQCKESIAQTKQGTWLNPGFPPQSCGYASVTDAEAVIVKATPHQVLVDEYTGEWVDSQFPTGKCNKDICPTVHNSTTWHSDYKVTGLCDANLISMDITFFSEDGKLTSLGKEGTGFRSNYFAYENGDKACRMQYCKHWGVRLPSGVWFEMADKDIYNDAKFPDCPEGSSIAAPSQTSVDVSLIQDVERILDYSLCQETWSKIRAHLPISPVDLSYLSPKNPGTGPAFTIINGTLKYFETRYIRVDIAGPIIPQMRGVISGTTTERELWTDWYPYEDVEIGPNGVLKTATGYKFPLYMIGHGMLDSDLHISSKAQVFEHPHIQDAASQLPDDETLFFGDTGLSKNPIELVEGWFSGWKSTIASFFFIIGLVIGLYLVLRIGIALCIKCRVQEKRPKIYTDVEMNRLDR

SEQ ID NO: 218 - protein, 513 aa, synthetic construct
MLVLYLLLSLLALGAQCKFTIVFPHNQKGNWKNVPANYQYCPSSSDLNWHNGLIGTSLQVKMPKSHKAIQADGWMCHAAKWVTTCDFRWYGPKYVTHSIKSMIPTVDQCKESIAQTKQGTWLNPGFPPQSCGYASVTDAEAVIVKATPHQVLVDEYTGEWVDSQFPTGKCNKDICPTVHNSTTWHSDYKVTGLCDANLISMDITFFSEDGKLTSLGKEGTGFRSNYFAYENGDKACRMQYCKHWGVRLPSGVWFEMADKDIYNDAKFPDCPEGSSIAAPSQTSVDVSLIQDVERILDYSLCQETWSKIRAHLPISPVDLSYLSPKNPGTGPAFTIINGTLKYFETRYIRVDIAGPIIPQMRGVISGTTTERELWTDWYPYEDVEIGPNGVLKTATGYKFPLYMIGHGMLDSDLHISSKAQVFEHPHIQDAASQLPDDETLFFGDTGLSKNPIELVEGWFSGWKSTIASFFFIIGLVIGLYLVLRIGIALCIKCRVQEKRPKIYTDVEMNRLDR

SEQ ID NO: 219 - DNA, 20 bp, synthetic construct
  source 1..20: mol_type = other DNA
aattgcggtgtgagagggag

SEQ ID NO: 220 - DNA, 20 bp, synthetic construct
  source 1..20: mol_type = other DNA
aagtaagggtgccggttagc

SEQ ID NO: 221 - protein, 771 aa, synthetic construct
MKCLLYLAFLFIGVNCKDIQMTQSPSSLSASVGDRVTITCRASQDIRNYLNWYQQKPGKAPKLLIYYTSRLESGVPSRFSGSGSGTDYTLTISSLQPEDFATYYCQQGNTLPWTFGQGTKVEIKGGGGSGGGGSGGGGSEVQLVESGGGLVQPGGSLRLSCAASGYSFTGYTMNWVRQAPGKGLEWVALINPYKGVSTYNQKFKDRFTISVDKSKNTAYLQMNSLRAEDTAVYYCARSGYYGDSDWYFDVWGQGTLVTVSSCPPCPAPELLGGPSVFKFTIVFPHNQKGNWKNVPSNYHYCPSSSDLNWHNDLIGTALQVKMPSHKAIQADGWMCHASKWVTTCDFRWYGPKYITHSIRSFTPSVEQCKESIEQTKQGTWLNPGFPPQSCGYATVTDAEAVIVQVTPHHVLVDEYTGEWVDSQFINGKCSNYICPTVHNSTTWHSDYKVKGLCDSNLISMDITFFSEDGELSSLGKEGTGFRSNYFAYETGGKACKMQYCKHWGVRLPSGVWFEMADKDLFAAARFPECPEGSSISAPSQTSVDVSLIQDVERILDYSLCQETWSKIRAGLPISPVDLSYLAPKNPGTGPAFTIINGTLKYFETRYIRVDIAAPILSRMVGMISGTTTERELWDDWAPYEDVEIGPNGVLRTSSGYKFPLYMIGHGMLDSDLHLSSKAQVFEHPHIQDAASQLPDDESLFFGDTGLSKNPIELVEGWFSSWKSSIASFFFIIGLIIGLFLVLRVGIHLCIKLKHTKKRQIYTDIEMNRLGK

SEQ ID NO: 222 - protein, 770 aa, synthetic construct
MKCLLYLAFLFIGVNCKEVQLVESGGGLVQPGGSLRLSCAASGYSFTGYTMNWVRQAPGKGLEWVALINPYKGVSTYNQKFKDRFTISVDKSKNTAYLQMNSLRAEDTAVYYCARSGYYGDSDWYFDVWGQGTLVTVSGGGGSGGGGSGGGGSDIQMTQSPSSLSASVGDRVTITCRASQDIRNYLNWYQQKPGKAPKLLIYYTSRLESGVPSRFSGSGSGTDYTLTISSLQPEDFATYYCQQGNTLPWTFGQGTKVEIKCPPCPAPELLGGPSVFKFTIVFPHNQKGNWKNVPSNYHYCPSSSDLNWHNDLIGTALQVKMPSHKAIQADGWMCHASKWVTTCDFRWYGPKYITHSIRSFTPSVEQCKESIEQTKQGTWLNPGFPPQSCGYATVTDAEAVIVQVTPHHVLVDEYTGEWVDSQFINGKCSNYICPTVHNSTTWHSDYKVKGLCDSNLISMDITFFSEDGELSSLGKEGTGFRSNYFAYETGGKACKMQYCKHWGVRLPSGVWFEMADKDLFAAARFPECPEGSSISAPSQTSVDVSLIQDVERILDYSLCQETWSKIRAGLPISPVDLSYLAPKNPGTGPAFTIINGTLKYFETRYIRVDIAAPILSRMVGMISGTTTERELWDDWAPYEDVEIGPNGVLRTSSGYKFPLYMIGHGMLDSDLHLSSKAQVFEHPHIQDAASQLPDDESLFFGDTGLSKNPIELVEGWFSSWKSSIASFFFIIGLIIGLFLVLRVGIHLCIKLKHTKKRQIYTDIEMNRLGK

SEQ ID NO: 223 - protein, 5 aa, synthetic construct
GYTMN

SEQ ID NO: 224 - protein, 17 aa, synthetic construct
LINPYKGVSTYNQKFKD

SEQ ID NO: 225 - protein, 13 aa, synthetic construct
SGYYGDSDWYFDV

SEQ ID NO: 226 - protein, 11 aa, synthetic construct
RASQDIRNYLN

SEQ ID NO: 227 - protein, 7 aa, synthetic construct
YTSRLES

SEQ ID NO: 228 - protein, 9 aa, synthetic construct
QQGNTLPWT

SEQ ID NO: 229 - protein, 5 aa, synthetic construct
RYTMH

SEQ ID NO: 230 - protein, 17 aa, synthetic construct
YINPSRGYTNYNQKFKD

SEQ ID NO: 231 - protein, 10 aa, synthetic construct
YYDDHYSLDY

SEQ ID NO: 232 - protein, 10 aa, synthetic construct
RASSSVSYMN

SEQ ID NO: 233 - protein, 7 aa, synthetic construct
DTSKVAS

SEQ ID NO: 234 - protein, 9 aa, synthetic construct
QQWSSNPLT

SEQ ID NO: 235 - protein, 5 aa, synthetic construct
SYTMH

SEQ ID NO: 236 - protein, 17 aa, synthetic construct
YINPRSGYTHYNQKLKD

SEQ ID NO: 237 - protein, 11 aa, synthetic construct
SAYYDYDGFAY

SEQ ID NO: 238 - protein, 10 aa, synthetic construct
SASSSVSYMN

SEQ ID NO: 239 - protein, 7 aa, synthetic construct
DTSKLAS

SEQ ID NO: 240 - protein, 9 aa, synthetic construct
QQWSSNPPT

SEQ ID NO: 241 - protein, 5 aa, synthetic construct
RYTMH

SEQ ID NO: 242 - protein, 17 aa, synthetic construct
YINPSRGYTNYNQKFKD

SEQ ID NO: 243 - protein, 10 aa, synthetic construct
YYDDHYCLDY

SEQ ID NO: 244 - protein, 10 aa, synthetic construct
SASSSVSYMN

SEQ ID NO: 245 - protein, 7 aa, synthetic construct
DTSKLAS

SEQ ID NO: 246 - protein, 9 aa, synthetic construct
QQWSSNPFT

SEQ ID NO: 247 - protein, 5 aa, synthetic construct
RYTMH

SEQ ID NO: 248 - protein, 17 aa, synthetic construct
YINPSRGYTNYNQKFKD

SEQ ID NO: 249 - protein, 10 aa, synthetic construct
YYDDHYSLDY

SEQ ID NO: 250 - protein, 10 aa, synthetic construct
RASSSVSYMN

SEQ ID NO: 251 - protein, 7 aa, synthetic construct
DTSKVAS

SEQ ID NO: 252 - protein, 9 aa, synthetic construct
QQWSSNPLT

SEQ ID NO: 253 - protein, 17 aa, synthetic construct
MNFLLLTFIVLPLCSHA

SEQ ID NO: 254 - protein, 16 aa, synthetic construct
MLRLFLFCFLALGAHS

SEQ ID NO: 255 - protein, 17 aa, synthetic construct
MLVLYLLLSLLALGAQC

SEQ ID NO: 256 - protein, 20 aa, synthetic construct
MAGFYLLALTLVCYLTLVES

SEQ ID NO: 257 - protein, 19 aa, synthetic construct
MECIMFWTILALSISFGFS

SEQ ID NO: 258 - protein, 511 aa, synthetic construct
MKCLLYLAFLFIGVNCKFTIVFPHNQKGNWKNVPSNYHYCPSSSDLNWHNDLIGTAJQVKMPKSHKAIQADGWMCHASKWVTTCDFRWYGPKYITQSIRSFTPSVEQCKESIEQTKQGTWLNPGFPPQSCGYATVTDAEAVIVQVTPHHVLVDEYTGEWVDSQFINGKCSNYICPTVHNSTTWHSDYKVKGLCDSNLISMDITFFSEDGELSSLGKEGTGFRSNYFAYETGGKACKMQYCKHWGVRLPSGVWFEMADKDLFAAARFPECPEGSSISAPSQTSVDVSLIQDVERILDYSLCQETWSKIRAGLPISPVDLSYLAPKNPGTGPAFTIINGTLKYFETRYIRVDIAAPILSRMVGMISGTTTERELWDDWAPYEDVEIGPNGVLRTSSGYKFPLYMIGHGMLDSDLHLSSKAQVFEHPHIQDAASQLPDDESLFFGDTGLSKNPIELVEGWFSSWKSSIASFFFIIGLIIGLFLVLRVGIHLCIKLKHTKKRQIYTDIEMNRLGK

SEQ ID NO: 259 - protein, 551 aa, synthetic construct
MAGFYLLALTLVCYLTLVESDGTPAPVVKNETGDFLWGLGTELILPVEVISKWVEINPEDMRCPSDPVTDHVIGAIVGHTRFSRYSGFHKATQKGFLCHKMRWITACTTTWYFSHDVQRRVEAQEPGTQECLDQVKKRGEGTEEEGSYPPSQCAWNSVNEEAEVVIHLTVHEVRVDPYTMELLDPVFPSGRCNTTACDTVHQSVLWIEDPSKTRPSCGDRVVDEGNIIRSGWTDNVPGAYYLISQHLPPTKIDGACRLSFCGESGLLFENGIWTHDIKLETVVANQTFQNCQADRRAGAVGPTYEIDKLRFDWEAAKEKIKCLDMIEIISATGALSFRRLHHFNPRTPGIHPVYRIVNKTLQMAKAHYVVTNNPMSHKGTRDCLGTYMDHDTRKCVAWHHWVDVGNGTEQGPNGLLVTGDKVSYPHWFIREKTWDPALHIINYLQNADHPIVSHLGRYIDNASRDSLRKDRSENVGDAASAAVTKLAGSIGGVFKDVWHVITTCVTVGVIIIIILIFRRMIGVFWRGREKHPLPKTPNNIYQETHELKSFG

SEQ ID NO: 260 - protein, 573 aa, synthetic construct
MECIMFWTILALSISFGFSYPIEDQMTIPLKPGIHRTLDGDLDYNDDEHYHSPPLVLPVPNNRSWKPVNLSTLKCPESSHLGPDTHRTLEKWLIFRPKSSILTKIEGVLCHKSRWLTRCQYTWYFSKTISRKIEPIPPTFQECQEAIKLKEEGILENLGFPPPNCYWARTNDEENILIEISEHPMTYDPYLDGVIDSILVGGKCSQKECETVHDSTIWIETQRDTRPSQCDMGTEEQLELVSGLKQIDGNKQKYQHSVFVVGTNYPFMDAKGACKLRFCGKSGMLLSNGLWFNIAHTILPKPEANSNFWSALPDCSSDKQVGVLGEEYEIEKLQATMEDIMWDLDCFRTVDSLAHHKKVSMLDLFRLAKLTPGPGPAYKLIEGTLMMKEVQYVKARRDTKEQANPLCAAYITESTSNQERCIDYSNYDQNGTYKGQVMNGILVTDGVLIFPHERFHLRQWDPEFIIKHDLQQVHHPVIGNFSKKLHDSIHNSLIKDHSANLGDVMGNWVKVAASKVSGFFKEIEKFLIGGLLLVVILLMVGLLCKCKCRRKPKAKNLKANSSGDEMSPNESIF

SEQ ID NO: 261-262 - skipped (2 entries)

SEQ ID NO: 263 - DNA, 6992 bp, synthetic construct
  source 1..6992: mol_type = other DNA
ggaattcgagctcgccccgttacataacttacggtaaatggcccgcctggctgaccgcccaacgacccccgcccattgacgtcaataatgacgtatgttcccatagtaacgccaatagggactttccattgacgtcaatgggtggagtatttacggtaaactgcccacttggcagtacatcaagtgtatcatatgccaagtacgccccctattgacgtcaatgacggtaaatggcccgcctggcattatgcccagtacatgaccttatgggactttcctacttggcagtacatctacgtattagtcatcgctattaccatggtgatgcggttttggcagtacatcaatgggcgtggatagcggtttgactcacggggatttccaagtctccaccccattgacgtcaatgggagtttgttttggcaccaaaatcaacgggactttccaaaatgtcgtaacaactccgccccattgacgcaaatgggcggtaggcgtgtacggtgggaggtctatataagcagagctcgtttagtgaaccgtcagatcgcctggagacgccatccacgctgttttgacctccatagaagacaccgggaccgatccagcctccgggggatcgatccccccgatcctgagaacttcagggtgagtttggggacccttgattgttctttctttttcgctattgtaaaattcatgttatatggagggggcaaagttttcagggtgttgtttagaatgggaagatgtcccttgtatcaccatggaccctcatgataattttgtttctttcactttctactctgttgacaaccattgtctcctcttattttcttttcattttctgtaactttttcgttaaactttagcttgcatttgtaacgaatttttaaattcacttttgtttatttgtcagattgtaagtactttctctaatcacttttttttcaaggcaatcagggtatattatattgtacttcagcacagttttagagaacaattgttataattaaatgataaggtagaatatttctgcatataaattctggctggcgtggaaatattcttattggtagaaacaactacatcctggtcatcatcctgcctttctctttatggttacaatgatatacactgtttgagatgaggataaaatactctgagtccaaaccgggcccctctgctaaccatgttcatgccttcttctttttcctacagctcctgggcaacgtgctggttattgtgctgtctcatcattttggcaaagaattgtaatacgactcactatagggcgaattcggatcccccggtagttaattaatacgcgtcactatgaagtgcctgctgtacctggccttcctgttcatcggcgtgaactgcaagatgggccacacccgccgccagggcaccagccccagcaagtgcccctacctgaacttcttccagctgctggtgctggccggcctgagccacttctgcagcggcgtgatccacgtgaccaaggaggtgaaggaggtggccaccctgagctgcggccacaacgtgagcgtggaggagctggcccagacccgcatctactggcagaaggagaagaagatggtgctgaccatgatgagcggcgacatgaacatctggcccgagtacaagaaccgcaccatcttcgacatcaccaacaacctgagcatcgtgatcctggccctgcgccccagcgacgagggcacctacgagtgcgtggtgctgaagtacgagaaggacgccttcaagcgcgagcacctggccgaggtgaccctgagcgtgaaggccgacttccccacccccagcatcagcgacttcgagatccccaccagcaacatccgccgcatcatctgcagcaccagcggcggcttccccgagccccacctgagctggctggagaacggcgaggagctgaacgccatcaacaccaccgtgagccaggaccccgagaccgagctgtacgccgtgagcagcaagctggacttcaacatgaccaccaaccacagcttcatgtgcctgatcaagtacggccacctgcgcgtgaaccagaccttcaactggaacaccaccaagcaggagcacttccccgacaacctgctgcccagctgggccatcaccctgatcagcgtgaacggcatcttcgtgatctgctgcctgacctactgcttcgccccccgctgccgcgagtgccccccctgccccgcccccgagctgctgggcggccccagcgtgttcaagttcacgatcgtttttccacacaaccaaaaaggaaactggaaaaatgttccttctaattaccattattgcccgtcaagctcagatttaaattggcataatgacttaataggcacagccttacaagtcaaaatgccccagagtcacaaggctattcaagcagacggttggatgtgtcatgcttccaaatgggtcactacttgtgatttccgctggtatggaccgaagtatataacacattccatccgatccttcactccatctgtagaacaatgcaaggaaagcattgaacaaacgaaacaaggaacttggctgaatccaggcttccctcctcaaagttgtggatatgcaactgtgacggatgccgaagcagtgattgtccaggtgactcctcaccatgtgctggttgatgaatacacaggagaatgggttgattcacagttcatcaacggaaaatgcagcaattacatatgccccactgtccataactctacaacctggcattctgactataaggtcaaagggctatgtgattctaacctcatttccatggacatcaccttcttctcagaggacggagagctatcatccctgggaaaggagggcacagggttcagaagtaactactttgcttatgaaactggaggcaaggcctgcaaaatgcaatactgcaagcattggggagtcagactcccatcaggtgtctggttcgagatggctgataaggatctctttgctgcagccagattccctgaatgcccagaagggtcaagtatctctgctccatctcagacctcagtggatgtaagtctaattcaggacgttgagaggatcttggattattccctctgccaagaaacctggagcaaaatcagagcgggtcttccaatctctccagtggatctcagctatcttgctcctaaaaacccaggaaccggtcctgctttcaccataatcaatggtaccctaaaatactttgagaccagatacatcagagtcgatattgctgctccaatcctctcaagaatggtcggaatgatctccggaactaccacagaacaggaactgtgggatgactgggcgccatatgaagacgtggaaattggacccaatggagttctgaggaccagttcaggatataagtttcctttatacatgattggacatggtatgttggactccgatcttcatcttagctcaaaggctcaggtgttcgaacatcctcacattcaagacgctgcttcgcaacttcctgatgatgagagtttattttttggtgatactgggctatccaaaaatccaatcgagcttgtagaaggttggttcagtagttggaaaagctctattgcctcttttttctttatcatagggttaatcattggactattcttggttctccgagttggtatccatctttgcattaaattaaagcacaccaagaaaagacagatttatacagacatagagatgaaccgacttggaaagtaactcaaatcctgctaggtatgaaaaaaactaacagatatcacgcctaggactagtgtgaaatagacatcagaattaagaaaaacgtagggtccaagtggttccccgttatggactcgctatctgtcaaccagatcttataccctgaagttcacctagatagcccgatagttaccaataagatagtagccatcctggagtatgctcgactgtttaaacctgcaggcatgcaagctgatctttttccctctgccaaaaattatggggacatcatgaagccccttgagcatctgacttctggctaataaaggaaatttattttcattgcaatagtgtgttggaattttttgtgtctctcactcggaaggacatatgggagggcaaatcatttaaaacatcagaatgagtatttggtttagagtttggcaacatatgcccatatgctggctgccatgaacaaaggttggctataaagaggtcatcagtatatgaaacagccccctgctgtccattccttattccatagaaaagccttgacttgaggttagattttttttatattttgttttgtgttatttttttctttaacatccctaaaattttccttacatgttttactagccagatttttcctcctctcctgactactcccagtcatagctgtccctcttctcttatggagatccctcgaggagctttttgcaaaagcctaggcctccaaaaaagcctcttcactacttctggaatagctcagaagccgaggcggcctcggcctctgcataaataaaaaaaattagtcagccatggggcggagaatgggcggaactgggcggagttaggggcgggatgggcggagttaggggcgggactatggttgctgactaattgctgcattaatgaatcggccaacgcgcggggagaggcggtttgcgtattgggcgctcttccgcttcctcgctcactgactcgctgcgctcggtcgttcggctgcggcgagcggtatcagctcactcaaaggcggtaatacggttatccacagaatcaggggataacgcaggaaagaacatgtgagcaaaaggccagcaaaaggccaggaaccgtaaaaaggccgcgttgctggcgtttttccataggctccgcccccctgacgagcatcacaaaaatcgacgctcaagtcagaggtggcgaaacccgacaggactataaagataccaggcgtttccccctggaagctccctcgtgcgctctcctgttccgaccctgccgcttaccggatacctgtccgcctttctcccttcgggaagcgtggcgctttctcatagctcacgctgtaggtatctcagttcggtgtaggtcgttcgctccaagctgggctgtgtgcacgaaccccccgttcagcccgaccgctgcgccttatccggtaactatcgtcttgagtccaacccggtaagacacgacttatcgccactggcagcagccactggtaacaggattagcagagcgaggtatgtaggcggtgctacagagttcttgaagtggtggcctaactacggctacactagaagaacagtatttggtatctgcgctctgctgaagccagttaccttcggaaaaagagttggtagctcttgatccggcaaacaaaccaccgctggtagcggtggtttttttgtttgcaagcagcagattacgcgcagaaaaaaaggatctcaagaagatcctttgatcttttctacggggtctgacgctcagtggaacgaaaactcacgttaagggattttggtcatgagattatcaaaaaggatcttcacctagatccttttaaattaaaaatgaagttttaaatcaatctaaagtatatatgagtaaacttggtctgacagttaccaatgcttaatcagtgaggcacctatctcagcgatctgtctatttcgttcatccatagttgcctgactccccgtcgtgtagataactacgatacgggagggcttaccatctggccccagtgctgcaatgataccgcgagacccacgctcaccggctccagatttatcagcaataaaccagccagccggaagggccgagcgcagaagtggtcctgcaactttatccgcctccatccagtctattaattgttgccgggaagctagagtaagtagttcgccagttaatagtttgcgcaacgttgttgccattgctacaggcatcgtggtgtcacgctcgtcgtttggtatggcttcattcagctccggttcccaacgatcaaggcgagttacatgatcccccatgttgtgcaaaaaagcggttagctccttcggtcctccgatagttgtcagaagtaagttggccgcagtgttatcactcatggttatggcagcactgcataattctcttactgtcatgccatccgtaagatgcttttctgtgactggtgagtactcaaccaagtcattctgagaatagtgtatgcggcgaccgagttgctcttgcccggcgtcaatacgggataataccgcgccacatagcagaactttaaaagtgctcatcattggaaaacgttcttcggggcgaaaactctcaaggatcttaccgctgttgagatccagttcgatgtaacccactcgtgcacccaactgatcttcagcatcttttactttcaccagcgtttctgggtgagcaaaaacaggaaggcaaaatgccgcaaaaaagggaataagggcgacacggaaatgttgaatactcatactcttcctttttcaatattattgaagcatttatcagggttattgtctcatgagcggatacatatttgaatgtatttagaaaaataaacaaataggggttccgcgcacatttccccgaaaagtgccacctgacgtctaagaaaccattattatcatgacattaacctataaaaataggcgtatcacgaggccctttcgtctcgcgcgtttcggtgatgacggtgaaaacctctgacacatgcagctcccggagacggtcacagcttgtctgtaagcggatgccgggagcagacaagcccgtcagggcgcgtcagcgggtgttggcgggtgtcggggctggcttaactatgcggcatcagagcagattgtactgagagtgcaccattcgacgctctcccttatgcgactcctgcattaggaagcagcccagtagtaggttgaggccgttgagcaccgccgccgcaaggaatggtctggcttatcgaaattaatacgactcactatagggagacc

SEQ ID NO: 264 - protein, 273 aa, synthetic construct
MGHTRRQGTSPSKCPYLNFFQLLVLAGLSHFCSGVIHVTKEVKEVATLSCGHNVSVEELAQTRIYWQKEKKMVLTMMSGDMNIWPEYKNRTIFDITNNLSIVILALRPSDEGTYECVVLKYEKDAFKREHLAEVTLSVKADFPTPSISDFEIPTSNIRRIICSTSGGFPEPHLSWLENGEELNAINTTVSQDPETELYAVSSKLDFNMTTNHSFMCLIKYGHLRVNQTFNWNTTKQEHFPDNLLPSWAITLISVNGIFVICCLTYCFAPRCRE

SEQ ID NO: 265 - protein, 16 aa, synthetic construct
MLSYLIFALVVSPILG

SEQ ID NO: 266 - protein, 517 aa, synthetic construct
MLSYLILAIIVSPILGKIEIVFPQHTTGDWKRVPHEYNYCPTSADKNSHGTQTGIPVELTMPKGLTTHQVDGFMCHSALWMTTCDFRWYGPKYITHSIHNEEPTDYQCLEAIKAYKDGVGFNPGFPPQSCGYGTVTDAEAHIITVTPHSVKVDEYTGEWIDPHFIGGRCKGKICETVHNSTKWFTSSDGESVCSQLFTLVGGTFFSDSEEITSMGLPETGIRSNYFPYISTEGICKMPFCRKPGYKLKNDLWFQITDPDLDKTVRDLPHIKDCDLSSSIITPGEHATDISLISDVERILDYALCQNTWGKIEAGEPITPVDLSYLGPKNPGVGPVFTIINSSLHYFTSKYLRVELESPVIPRMEGRVAGTRIVRQLWDQWFPFGEAEIGPNGVLKTKQGYKFPLHIIGTGEVDSDIKMERIVKHWEHPHIEAAQTYLKKDDTEEVIYYGDTGISKYPVELVEGWFSGWRSSIMGVVAVIIGFVILIFLIRLIGVLSSLFRPKRRPIYKSDVEMAHFR

SEQ ID NO: 267 - protein, 501 aa, synthetic construct
KIEIVFPQHTTGDWKRVPHEYNYCPTSADKNSHGTQTGIPVELTMPQGLTTHQVDGFMCHSALWMTTCDFRWYGPKYITHSIHNEEPTDYQCLEAIKAYKDGVSFNPGFPPQSCGYGTVTDAEAHIVTVTPHSVKVDEYTGEWIDPHFIGGRCKGQICETVHNSTKWFTSSDGESVCSQLFTLVGGTFFSDSEEITSMGLPETGIRSNQFPYVSTEGICKMPFCRKPGYKLKNDLWFQITDPDLDKTVRDLPHIKDCDLSSSIVTPGEHATDISLISDVERILDYALCQNTWSKIEAGEPITPVDLSYLGPKNPGAGPVFTIINGSLHYFMSKYLRVELESPVIPRMEGKVAGTRIVQQLWDQWFPFGEVEIGPNGVLKTKQGYKFPLHIIGTGEVDNDIKMERIVKHWEHPHIEAAQTFLKKDDTEEVLYYGDTGVSKNPVELVEGWFSGWRSSIMGVLAVIIGFVILIFLIRLIGVLSSLFRQKRRPIYKSDVEMAHFR

SEQ ID NO: 268 - protein, 500 aa, synthetic construct
KIEIVFPQHTTGDWKRVPHEYNYCPTSADKNSHGTQTGIPVELTMPGLTTHQVDGFMCHSALWMTTCDFRWYGPKYITHSIHNEEPTDYQCLEAIKAYKDGVSFNPGFPPQSCGYGTVTDAEAHIVTVTPHSVKVDEYTGEWIDPHFIGGRCKGQICETVHNSTKWFTSSDGESVCSQLFTLVGGTFFSDSEEITSMGLPETGIRSNYFPYVSTEGICKMPFCRKPGYKLKNDLWFQITDPDLDKTVRDLPHIKDCDLSSSIVTPGEHATDISLISDVERILDYALCQNTWSKIEAGEPITPVDLSYLGPKNPGAGPVFTIINGSLHYFMSKYLRVELESPVIPRMEGKVAGTRIVRQLWDQWFPFGEVEIGPNGVLKTKQGYKFPLHIIGTGEVDNDIKMERIVKHWEHPHIEAAQTFLKKDDTEEVLYYGDTGVSKNPVELVEGWFSGWRSSIMGVLAVIIGFVILIFLIRLIGVLSSLFRQKRRPIYKSDVEMAHFR

SEQ ID NO: 269 - protein, 495 aa, synthetic construct
KFSIVFPQSQKGNWKNVPSSYHYCPSSSDQNWHNDLLGITMKVKMPQTHKAIQADGWMCHAAKWITTCDFRWYGPKYITHSIHSIQPTSEQCKESIKQTKQGTWMSPGFPPQNCGYATVTDSVAVVVQATPHHVLVDEYTGEWIDSQFPNGKCETEECETVHNSTVWYSDYKVTGLCDATLVDTEITFFSEDGKKESIGKPNTGYRSNQFAYEKGDKVCKMNYCKHAGVRLPSGVWFEFVDQDVYAAAKLPECPVGATISAPTQTSVDVSLILDVERILDYSLCQETWSKIRSKQPVSPVDLSYLAPKNPGTGPAFTIINGTLKYFETRYIRIDIDNPIISKMVGKISGSQTEQELWTEWFPYEGVEIGPNGILKTPTGYKFPLFMIGHGMLDSDLHKTSQAEVFEHPHLAEAPKQLPEEETLFFGDTGISKNPVELIEGWFSSWKSTVVTFFFAIGVFILLYVVARIVIAVRYRYQGSNNKRIYNDIEMSRFRK

SEQ ID NO: 270 - protein, 494 aa, synthetic construct
KFSIVFPQSQKGNWKNVPSSYHYCPSSSDQNWHNDLLGITMKVKMPTHKAIQADGWMCHAAKWITTCDFRWYGPKYITHSIHSIQPTSEQCKESIKQTKQGTWMSPGFPPQNCGYATVTDSVAVVVQATPHHVLVDEYTGEWIDSQFPNGKCETEECETVHNSTVWYSDYKVTGLCDATLVDTEITFFSEDGKKESIGKPNTGYRSNYFAYEKGDKVCKMNYCKHAGVRLPSGVWFEFVDQDVYAAAKLPECPVGATISAPTQTSVDVSLILDVERILDYSLCQETWSKIRSKQPVSPVDLSYLAPKNPGTGPAFTIINGTLKYFETRYIRIDIDNPIISKMVGKISGSQTERELWTEWFPYEGVEIGPNGILKTPTGYKFPLFMIGHGMLDSDLHKTSQAEVFEHPHLAEAPKQLPEEETLFFGDTGISKNPVELIEGWFSSWKSTVVTFFFAIGVFILLYVVARIVIAVRYRYQGSNNKRIYNDIEMSRFRK

SEQ ID NO: 271-274 - skipped (4 entries)

SEQ ID NO: 275 - protein, 502 aa, synthetic construct
KITISFPQSLKGDWRPVPKGYNYCPTSADKNLHGDLIDIGLRLRAPQSFKGISADGWMCHAARWITTCDFRWYGPKYITHSIHSFRPSNDQCKEAIRLTNEGNWINPGFPPQSCGYASVTDSESVVVTVTKHQVLVDEYSGSWIDSQFPGGSCTSPICDTVHNSTLWHADHTLDSICDQEFVAMDAVLFTESGKFEEFGKPNSGIRSNQFPYESLKDVCQMDFCKRKGFKLPSGVWFEIEDAEKSHKAQVELKIKRCPHGAVISAPNQNAADINLIMDVERILDYSLCQATWSKIQNKEALTPIDISYLGPKNPGPGPAFTIINGTLHYFNTRYIRVDIAGPVTKEITGFVSGTSTSQVLWDQWFPYGENSIGPNGLLKTASGYKYPLFMVGTGVLDADIHKLGEATVIEHPHAKEAQKVVDDSEVIFFGDTGVSKNPVEVVEGWFSGWRSSLMSIFGIILLIVCLVLIVRILIALKYCCVRHKKRTIYKEDLEMGRIPRRA

SEQ ID NO: 276 - protein, 501 aa, synthetic construct
KITISFPQSLKGDWRPVPKGYNYCPTSADKNLHGDLIDIGLRLRAPSFKGISADGWMCHAARWITTCDFRWYGPKYITHSIHSFRPSNDQCKEAIRLTNEGNWINPGFPPQSCGYASVTDSESVVVTVTKHQVLVDEYSGSWIDSQFPGGSCTSPICDTVHNSTLWHADHTLDSICDQEFVAMDAVLFTESGKFEEFGKPNSGIRSNYFPYESLKDVCQMDFCKRKGFKLPSGVWFEIEDAEKSHKAQVELKIKRCPHGAVISAPNQNAADINLIMDVERILDYSLCQATWSKIQNKEALTPIDISYLGPKNPGPGPAFTIINGTLHYFNTRYIRVDIAGPVTKEITGFVSGTSTSRVLWDQWFPYGENSIGPNGLLKTASGYKYPLFMVGTGVLDADIHKLGEATVIEHPHAKEAQKVVDDSEVIFFGDTGVSKNPVEVVEGWFSGWRSSLMSIFGIILLIVCLVLIVRILIALKYCCVRHKKRTIYKEDLEMGRIPRRA

SEQ ID NO: 277 - protein, 501 aa, synthetic construct
RITISFPQSLKGDWRPVPKGYNYCPTSADKNLHGDLIDIGLRLRAPSFKGISADGWMCHAARWITTCDFRWYGPKYITHSIHSFRPSNDQCKEAIRLTNEGNWINPGFPPQSCGYASVTDSESVVVTVTKHQVLVDEYSGSWIDSQFPGGSCTSPICDTVHNSTLWHADHTLDSICDQEFVAMDAVLFTESGKFEEFGKPNSGIRSNYFPYESLKDVCQMDFCKRKGFKLPSGVWFEIEDAEKSHKAQVELKIKRCPHGAVISAPNQNAADINLIMDVERILDYSLCQATWSKIQNKEALTPIDISYLGPKNPGPGPAFTIINGTLHYFNTRYIRVDIAGPVTKEITGFVSGTSTSRVLWDQWFPYGENSIGPNGLLKTASGYKYPLFMVGTGVLDADIHKLGEATVIEHPHAKEAQKVVDDSEVIFFGDTGVSKNPVEVVEGWFSGWRSSLMSIFGIILLIVCLVLIVRILIALKYCCVRHKKRTIYKEDLEMGRIPRRA

SEQ ID NO: 278 - protein, 523 aa, synthetic construct
MKMKMVIAGLILCIGILPAIGRITISFPQSLKGDWRPVPKGYNYCPTSADKNLHGDLIDIGLRLRAPKSFKGISADGWMCHAARWITTCDFRWYGPKYITHSIHSFRPSNDQCKEAIRLTNEGNWINPGFPPQSCGYASVTDSESVVVTVTKHQVLVDEYSGSWIDSQFPGGSCTSPICDTVHNSTLWHADHTLDSICDQEFVAMDAVLFTESGKFEEFGKPNSGIRSNYFPYESLKDVCQMDFCKRKGFKLPSGVWFEIEDAEKSHKAQVELKIKRCPHGAVISAPNQNAADINLIMDVERILDYSLCQATWSKIQNKEALTPIDISYLGPKNPGPGPAFTIINGTLHYFNTRYIRVDIAGPVTKEITGFVSGTSTSRVLWDQWFPYGENSIGPNGLLKTASGYKYPLFMVGTGVLDADIHKLGEATVIEHPHAKEAQKVVDDSEVIFFGDTGVSKNPVEVVEGWFSGWRSSLMSIFGIILLIVCLVLIVRILIALKYCCVRHKKRTIYKEDLEMGRIPRRA

SEQ ID NO: 279 - protein, 502 aa, synthetic construct
KITISFPQSLKGDWRPVPKGYNYCPTSADKNLHGDLIDIGLRLRAPQSFKGISADGWMCHAARWITTCDFRWYGPKYITHSIHSFRPSNDQCKEAIRLTNEGNWINPGFPPQSCAYASVTDSESVVVTVTKHQVLVDEYSGSWIDSQFPGGSCTSPICDTVHNSTLWHADHTLDSICDQEFVAMDAVLFTESGKFEEFGKPNSGIRSNQFPYESLKDVCQMDFCKRKGFKLPSGVWFEIEDAEKSHKAQVELKIKRCPHGAVISAPNQNAADINLIMDVERILDYSLCQATWSKIQNKEALTPIDISYLGPKNPGPGPAFTIINGTLHYFNTRYIRVDIAGPVTKEITGFVSGTSTSQVLWDQWFPYGENSIGPNGLLKTASGYKYPLFMVGTGVLDADIHKLGEATVIEHPHAKEAQKVVDDSEVIFFGDTGVSKNPVEVVEGWFSGWRSSLMSIFGIILLIVCLVLIVRILIALKYCCVRHKKRTIYKEDLEMGRIPRRA

SEQ ID NO: 280 - protein, 501 aa, synthetic construct
KITISFPQSLKGDWRPVPKGYNYCPTSADKNLHGDLIDIGLRLRAPSFKGISADGWMCHAARWITTCDFRWYGPKYITHSIHSFRPSNDQCKEAIRLTNEGNWINPGFPPQSCAYASVTDSESVVVTVTKHQVLVDEYSGSWIDSQFPGGSCTSPICDTVHNSTLWHADHTLDSICDQEFVAMDAVLFTESGKFEEFGKPNSGIRSNYFPYESLKDVCQMDFCKRKGFKLPSGVWFEIEDAEKSHKAQVELKIKRCPHGAVISAPNQNAADINLIMDVERILDYSLCQATWSKIQNKEALTPIDISYLGPKNPGPGPAFTIINGTLHYFNTRYIRVDIAGPVTKEITGFVSGTSTSRVLWDQWFPYGENSIGPNGLLKTASGYKYPLFMVGTGVLDADIHKLGEATVIEHPHAKEAQKVVDDSEVIFFGDTGVSKNPVEVVEGWFSGWRSSLMSIFGIILLIVCLVLIVRILIALKYCCVRHKKRTIYKEDLEMGRIPRRA

SEQ ID NO: 281 - protein, 523 aa, synthetic construct
MKMKMVIAGLILCIGILPAIGKITISFPQSLKGDWRPVPKGYNYCPTSADKNLHGDLIDIGLRLRAPKSFKGISADGWMCHAARWITTCDFRWYGPKYITHSIHSFRPSNDQCKEAIRLTNEGNWINPGFPPQSCAYASVTDSESVVVTVTKHQVLVDEYSGSWIDSQFPGGSCTSPICDTVHNSTLWHADHTLDSICDQEFVAMDAVLFTESGKFEEFGKPNSGIRSNYFPYESLKDVCQMDFCKRKGFKLPSGVWFEIEDAEKSHKAQVELKIKRCPHGAVISAPNQNAADINLIMDVERILDYSLCQATWSKIQNKEALTPIDISYLGPKNPGPGPAFTIINGTLHYFNTRYIRVDIAGPVTKEITGFVSGTSTSRVLWDQWFPYGENSIGPNGLLKTASGYKYPLFMVGTGVLDADIHKLGEATVIEHPHAKEAQKVVDDSEVIFFGDTGVSKNPVEVVEGWFSGWRSSLMSIFGIILLIVCLVLIVRILIALKYCCVRHKKRTIYKEDLEMGRIPRRA

SEQ ID NO: 282 - protein, 494 aa, synthetic construct
KFTIVFPQSQKGDWKDVPPNYRYCPSSADQNWHGDLLGVNIRAKMPQVHKAIKADGWMCHAAKWVTTCDYRWYGPQYITHSIHSFIPTKAQCEESIKQTKEGVWINPGFPPKNCGYASVSDAESIIVQATAHSVMIDEYSGDWLDSQFPTGRCTGSTCETIHNSTLWYADYQVTGLCDSALVSTEVTFYSEDGLMTSIGRQNTGYRSNQFPYEKGAAACRMKYCTHEGIRLPSGVWFEMVDKELLESVQMPECPAGLTISAPTQTSVDVSLILDVERMLDYSLCQETWSKVHSGLPISPVDLGYIAPKNPGAGPAFTIVNGTLKYFDTRYLRIDIEGPVLKKMTGKVSGTPTKQELWTEWFPYDDVEIGPNGVLKTPEGYKFPLYMIGHGLLDSDLQKTSQAEVFHHPQIAEAVQKLPDDETLFFGDTGISKNPVEVIEGWFSNWRSSVMAIVFAILLLVITVLMVRLCVAFRHFCCQKRHKIYNDLEMNQLRR

SEQ ID NO: 283 - protein, 493 aa, synthetic construct
KFTIVFPQSQKGDWKDVPPNYRYCPSSADQNWHGDLLGVNIRAKMPVHKAIKADGWMCHAAKWVTTCDYRWYGPQYITHSIHSFIPTKAQCEESIKQTKEGVWINPGFPPKNCGYASVSDAESIIVQATAHSVMIDEYSGDWLDSQFPTGRCTGSTCETIHNSTLWYADYQVTGLCDSALVSTEVTFYSEDGLMTSIGRQNTGYRSNYFPYEKGAAACRMKYCTHEGIRLPSGVWFEMVDKELLESVQMPECPAGLTISAPTQTSVDVSLILDVERMLDYSLCQETWSKVHSGLPISPVDLGYIAPKNPGAGPAFTIVNGTLKYFDTRYLRIDIEGPVLKKMTGKVSGTPTKRELWTEWFPYDDVEIGPNGVLKTPEGYKFPLYMIGHGLLDSDLQKTSQAEVFHHPQIAEAVQKLPDDETLFFGDTGISKNPVEVIEGWFSNWRSSVMAIVFAILLLVITVLMVRLCVAFRHFCCQKRHKIYNDLEMNQLRR

SEQ ID NO: 284 - protein, 493 aa, synthetic construct
RFTIVFPQSQKGDWKDVPPNYRYCPSSADQNWHGDLLGVNIRAKMPVHKAIKADGWMCHAAKWVTTCDYRWYGPQYITHSIHSFIPTKAQCEESIKQTKEGVWINPGFPPKNCGYASVSDAESIIVQATAHSVMIDEYSGDWLDSQFPTGRCTGSTCETIHNSTLWYADYQVTGLCDSALVSTEVTFYSEDGLMTSIGRQNTGYRSNYFPYEKGAAACRMKYCTHEGIRLPSGVWFEMVDKELLESVQMPECPAGLTISAPTQTSVDVSLILDVERMLDYSLCQETWSKVHSGLPISPVDLGYIAPKNPGAGPAFTIVNGTLKYFDTRYLRIDIEGPVLKKMTGKVSGTPTKRELWTEWFPYDDVEIGPNGVLKTPEGYKFPLYMIGHGLLDSDLQKTSQAEVFHHPQIAEAVQKLPDDETLFFGDTGISKNPVEVIEGWFSNWRSSVMAIVFAILLLVITVLMVRLCVAFRHFCCQKRHKIYNDLEMNQLRR

SEQ ID NO: 285 - protein, 511 aa, synthetic construct
MTPAFILCMLLAGSSWARFTIVFPQSQKGDWKDVPPNYRYCPSSADQNWHGDLLGVNIRAKMPKVHKAIKADGWMCHAAKWVTTCDYRWYGPQYITHSIHSFIPTKAQCEESIKQTKEGVWINPGFPPKNCGYASVSDAESIIVQATAHSVMIDEYSGDWLDSQFPTGRCTGSTCETIHNSTLWYADYQVTGLCDSALVSTEVTFYSEDGLMTSIGRQNTGYRSNYFPYEKGAAACRMKYCTHEGIRLPSGVWFEMVDKELLESVQMPECPAGLTISAPTQTSVDVSLILDVERMLDYSLCQETWSKVHSGLPISPVDLGYIAPKNPGAGPAFTIVNGTLKYFDTRYLRIDIEGPVLKKMTGKVSGTPTKRELWTEWFPYDDVEIGPNGVLKTPEGYKFPLYMIGHGLLDSDLQKTSQAEVFHHPQIAEAVQKLPDDETLFFGDTGISKNPVEVIEGWFSNWRSSVMAIVFAILLLVITVLMVRLCVAFRHFCCQKRHKIYNDLEMNQLRR

SEQ ID NO: 286 - protein, 511 aa, synthetic construct; identical to SEQ ID NO: 285

SEQ ID NO: 287 - protein, 493 aa, synthetic construct
KFTIVFPQSQKGDWKDVPPNYRYCPSSADQNWHGDLLGVNIRAKMPVHKAIKADGWMCHAAKWVTTCDYRWYGPQYITHSIHSFIPTKAQCEESIKQTKEGVWINPGFPPKNCAYASVSDAESIIVQATAHSVMIDEYSGDWLDSQFPTGRCTGSTCETIHNSTLWYADYQVTGLCDSALVSTEVTFYSEDGLMTSIGRQNTGYRSNYFPYEKGAAACRMKYCTHEGIRLPSGVWFEMVDKELLESVQMPECPAGLTISAPTQTSVDVSLILDVERMLDYSLCQETWSKVHSGLPISPVDLGYIAPKNPGAGPAFTIVNGTLKYFDTRYLRIDIEGPVLKKMTGKVSGTPTKRELWTEWFPYDDVEIGPNGVLKTPEGYKFPLYMIGHGLLDSDLQKTSQAEVFHHPQIAEAVQKLPDDETLFFGDTGISKNPVEVIEGWFSNWRSSVMAIVFAILLLVITVLMVRLCVAFRHFCCQKRHKIYNDLEMNQLRR

SEQ ID NO: 288 - protein, 511 aa, synthetic construct
MTPAFILCMLLAGSSWAKFTIVFPQSQKGDWKDVPPNYRYCPSSADQNWHGDLLGVNIRAKMPKVHKAIKADGWMCHAAKWVTTCDYRWYGPQYITHSIHSFIPTKAQCEESIKQTKEGVWINPGFPPKNCAYASVSDAESIIVQATAHSVMIDEYSGDWLDSQFPTGRCTGSTCETIHNSTLWYADYQVTGLCDSALVSTEVTFYSEDGLMTSIGRQNTGYRSNYFPYEKGAAACRMKYCTHEGIRLPSGVWFEMVDKELLESVQMPECPAGLTISAPTQTSVDVSLILDVERMLDYSLCQETWSKVHSGLPISPVDLGYIAPKNPGAGPAFTIVNGTLKYFDTRYLRIDIEGPVLKKMTGKVSGTPTKRELWTEWFPYDDVEIGPNGVLKTPEGYKFPLYMIGHGLLDSDLQKTSQAEVFHHPQIAEAVQKLPDDETLFFGDTGISKNPVEVIEGWFSNWRSSVMAIVFAILLLVITVLMVRLCVAFRHFCCQKRHKIYNDLEMNQLRR

SEQ ID NO: 289 - protein, 495 aa, synthetic construct
KFTIVFPHNQKGNWKNVPSNYHYCPSSSDLNWHNDLIGTAIQVKMPQSHKAIQADGWMCHASKWVTTCDFRWYGPKYITQSIRSFTPSVEQCKESIEQTKQGTWLNPGFPPQSCGYATVTDAEAVIVQVTPHHVLVDEYTGEWVDSQFINGKCSNYICPTVHNSTTWHSDYKVKGLCDSNLISMDITFFSEDGELSSLGKEGTGFRSNQFAYETGGKACKMQYCKHWGVRLPSGVWFEMADKDLFAAARFPECPEGSSISAPSQTSVDVSLIQDVERILDYSLCQETWSKIRAGLPISPVDLSYLAPKNPGTGPAFTIINGTLKYFETRYIRVDIAAPILSRMVGMISGTTTEQELWDDWAPYEDVEIGPNGVLRTSSGYKFPLYMIGHGMLDSDLHLSSKAQVFEHPHIQDAASQLPDDESLFFGDTGLSKNPIELVEGWFSSWKSSIASFFFIIGLIIGLFLVLRVGIHLCIKLKHTKKRQIYTDIEMNRLGK

SEQ ID NO: 290 - protein, 494 aa, synthetic construct
KFTIVFPHNQKGNWKNVPSNYHYCPSSSDLNWHNDLIGTAIQVKMPSHKAIQADGWMCHASKWVTTCDFRWYGPKYITQSIRSFTPSVEQCKESIEQTKQGTWLNPGFPPQSCGYATVTDAEAVIVQVTPHHVLVDEYTGEWVDSQFINGKCSNYICPTVHNSTTWHSDYKVKGLCDSNLISMDITFFSEDGELSSLGKEGTGFRSNYFAYETGGKACKMQYCKHWGVRLPSGVWFEMADKDLFAAARFPECPEGSSISAPSQTSVDVSLIQDVERILDYSLCQETWSKIRAGLPISPVDLSYLAPKNPGTGPAFTIINGTLKYFETRYIRVDIAAPILSRMVGMISGTTTERELWDDWAPYEDVEIGPNGVLRTSSGYKFPLYMIGHGMLDSDLHLSSKAQVFEHPHIQDAASQLPDDESLFFGDTGLSKNPIELVEGWFSSWKSSIASFFFIIGLIIGLFLVLRVGIHLCIKLKHTKKRQIYTDIEMNRLGK